(19) United States
(12) Patent Application Publication
(10) Pub. No.: US 2023/0021431 A1
(43) Pub. Date: Jan. 26, 2023

(54) OLIGONUCLEOTIDES FOR SARS-CoV-2 MODULATION

(71) Applicant: UNIVERSITY OF MASSACHUSETTS, Boston, MA (US)

(72) Inventors: Anastasia Khvorova, Westborough, MA (US); Jonathan Watts, Worcester, MA (US); Zachary Kennedy, Worcester, MA (US); Annabelle Biscans, Cambridge, MA (US); Bruno Miguel da Cruz Godinho, Worcester, MA (US); Chantal Ferguson, Worcester, MA (US); Dimas Echeverria Moreno, Worcester, MA (US); Ken Yamada, Boston, MA (US); Daniel O'Reilly, Boston, MA (US); Kathryn Monopoli, Boston, MA (US); Vignesh Narayan Hariharan, Boston, MA (US); Qi Tang, Boston, MA (US); Sarah Davis, Boston, MA (US); Samuel Hildebrand, Boston, MA (US); Socheata Ly, Boston, MA (US); Minwook Shin, Boston, MA (US); Pranathi Meda Krishnamurthy, Boston, MA (US); Nicholas McHugh, Boston, MA (US); Jacquelyn Sousa, Boston, MA (US); Jillian Caiazzi, Boston, MA (US); Yann Thillier, Boston, MA (US); Gitali Devi, Boston, MA (US)

(21) Appl. No.: 17/333,839

(22) Filed: May 28, 2021

Related U.S. Application Data
(60) Provisional application No. 63/084,817, filed on Sep. 29, 2020.
(60) Provisional application No. 63/031,222, filed on May 28, 2020.

(51) Int. Cl. C12N 15/113

(52) U.S. Cl. CPC C12N 15/1131; C12N 15/1137; C12N 15/1136; C12N 2310/14; C12N 2320/32; C12N 2310/321; C12N 2310/3515; C12N 2310/351; C12N 2310/315

(57) ABSTRACT

This disclosure relates to novel SARS-CoV-2 targeting sequences. Novel SARS-CoV-2 targeting oligonucleotides for the treatment of SARS-CoV-2 infection are also provided.

### CROSS-REFERENCE TO RELATED APPLICATIONS

[0001] This application claims the benefit of U.S. Provisional Application Ser. No. 63/031,222, filed May 28, 2020, and U.S. Provisional Application Ser. No. 63/084,817, filed Sep. 29, 2020, the entire disclosures of which are incorporated herein by reference.

### SEQUENCE LISTING

[0002] The instant application contains a Sequence Listing which has been submitted electronically in ASCII format and is hereby incorporated by reference in its entirety. Said ASCII copy, created on Sep. 8, 2021, is named 718622_UM9-258_ST25.txt and is 520,824 bytes in size.

### FIELD OF THE INVENTION

[0003] This disclosure relates to novel SARS-CoV-2 targeting sequences, novel branched oligonucleotides, and novel methods for treating and preventing SARS-CoV-2-related infection.

### BACKGROUND

[0004] SARS-CoV-2 (severe acute respiratory syndrome coronavirus 2) is a highly infectious virus that causes severe respiratory illness. The SARS-CoV-2 genome encodes for four structural proteins, S (spike), E (envelope), M (membrane) and N (nucleocapsid). The spike protein plays a critical role in viral entry into a host cell. SARS-CoV-2 is the causative agent of the COVID-19 epidemic that has infected and kills millions of people worldwide.

[0005] RNAi-based therapeutics are revolutionizing human medicine. Currently, a single subcutaneous injection of chemically modified oligonucleotide compounds supports up to 12-months of target silencing in the liver with a clean adverse events profile. The ability to develop RNAi-based drugs is dependent on efficient delivery to the targeted tissues. Currently, the liver is the only tissue validated for clinical delivery.

[0006] With the current clinical approaches, it is not possible to halt or cure SARS-CoV-2 infection. The highly infectious virus is spreading throughout the world, leaving a path of destruction and death. Survivors of a severe infection with SARS-CoV-2 often present with long lasting lung injury and scarring.

[0007] There is a clear need for a therapeutic that can effectively neutralize SARS-CoV-2 particles from causing infection, and especially to selectively do so in the lung. This could be accomplished using optimized RNAi-based therapeutics, which is addressed in the present application.

### SUMMARY

[0008] In one aspect, the disclosure provides an RNA molecule having a length of from about 8 nucleotides to about 80 nucleotides; and a nucleic acid sequence that is substantially complementary to a SARS-CoV-2 nucleic acid sequence of SEQ ID NO: 1. In certain embodiments, the RNA molecule is from 8 nucleotides to 80 nucleotides in length (e.g., 8 nucleotides, 9 nucleotides, 10 nucleotides, 11 nucleotides, 12 nucleotides, 13 nucleotides, 14 nucleotides, 15 nucleotides, 16 nucleotides, 17 nucleotides, 18 nucleotides, 19 nucleotides, 20 nucleotides, 21 nucleotides, 22 nucleotides, 23 nucleotides, 24 nucleotides, 25 nucleotides, 26 nucleotides, 27 nucleotides, 28 nucleotides, 29 nucleotides, 30 nucleotides, 31 nucleotides, 32 nucleotides, 33 nucleotides, 34 nucleotides, 35 nucleotides, 36 nucleotides, 37 nucleotides, 38 nucleotides, 39 nucleotides, 40 nucleotides, 41 nucleotides, 42 nucleotides, 43 nucleotides, 44 nucleotides, 45 nucleotides, 46 nucleotides, 47 nucleotides, 48 nucleotides, 49 nucleotides, 50 nucleotides, 51 nucleotides, 52 nucleotides, 53 nucleotides, 54 nucleotides, 55 nucleotides, 56 nucleotides, 57 nucleotides, 58 nucleotides, 59 nucleotides, 60 nucleotides, 61 nucleotides, 62 nucleotides, 63 nucleotides, 64 nucleotides, 65 nucleotides, 66 nucleotides, 67 nucleotides, 68 nucleotides, 69 nucleotides, 70 nucleotides, 71 nucleotides, 72 nucleotides, 73 nucleotides, 74 nucleotides, 75 nucleotides, 76 nucleotides, 77 nucleotides, 78 nucleotides, 79 nucleotides, or 80 nucleotides in length).

[0009] In certain embodiments, the RNA molecule is from 10 to 50 nucleotides in length (e.g., 10 nucleotides, 11 nucleotides, 12 nucleotides, 13 nucleotides, 14 nucleotides, 15 nucleotides, 16 nucleotides, 17 nucleotides, 18 nucleotides, 19 nucleotides, 20 nucleotides, 21 nucleotides, 22 nucleotides, 23 nucleotides, 24 nucleotides, 25 nucleotides, 26 nucleotides, 27 nucleotides, 28 nucleotides, 29 nucleotides, 30 nucleotides, 31 nucleotides, 32 nucleotides, 33 nucleotides, 34 nucleotides, 35 nucleotides, 36 nucleotides, 37 nucleotides, 38 nucleotides, 39 nucleotides, 40 nucleotides, 41 nucleotides, 42 nucleotides, 43 nucleotides, 44 nucleotides, 45 nucleotides, 46 nucleotides, 47 nucleotides, 48 nucleotides, 49 nucleotides, or 50 nucleotides in length).

[0010] In certain embodiments, the RNA molecule comprises about 15 nucleotides to about 25 nucleotides in length. In certain embodiments, the RNA molecule is from 15 to 25 nucleotides in length (e.g., 15 nucleotides, 16 nucleotides, 17 nucleotides, 18 nucleotides, 19 nucleotides, 20 nucleotides, 21 nucleotides, 22 nucleotides, 23 nucleotides, 24 nucleotides, or 25 nucleotides in length).

[0011] In one aspect, the disclosure provides an oligonucleotide compound comprising 15 to 35 bases in length, comprising a sequence substantially complementary to a SARS-CoV-2 nucleic acid sequence of SEQ ID NO: 1.

[0012] In certain embodiments, the oligonucleotide compound comprises a sequence substantially complementary to a SARS-CoV-2 nucleic acid sequence of any one of SEQ ID NOs: 2-10.

[0013] In certain embodiments, the oligonucleotide compound comprises a sequence substantially complementary to a SARS-CoV-2 nucleic acid sequence of any one of the 45-nucleotide target gene regions in Table 6A.

[0014] In certain embodiments, the oligonucleotide compound comprises a sequence substantially complementary to a SARS-CoV-2 nucleic acid sequence of any one of the 20-nucleotide targets in Table 6A.

[0015] In certain embodiments, the oligonucleotide compound comprises a sequence substantially complementary to a SARS-CoV-2 nucleic acid sequence of any one of the 45-nucleotide target gene regions of 7a_27751, N_29293, Orfla_2290, and Orflab_18571 in Table 6A.

[0016] In certain embodiments, the oligonucleotide compound comprises a sequence substantially complementary to a SARS-CoV-2 nucleic acid sequence of any one of the 20-nucleotide targets of 7a_27751, N_29293, Orfla_2290, and Orflab_18571 in Table 6A.

[0017] In certain embodiments, the oligonucleotide compound comprises complementarity to at least 10, 11, 12 or 13 contiguous nucleotides of the SARS-CoV-2 nucleic acid sequence of any one of SEQ ID NOs: 1-10. In certain embodiments, the oligonucleotide compound comprises no more than 3 mismatches with the SARS-CoV-2 nucleic acid sequence of any one of SEQ ID NOs: 1-10. In certain embodiments, the oligonucleotide compound comprises full complementarity to the SARS-CoV-2 nucleic acid sequence of any one of SEQ ID NOs: 1-10.

[0018] In another aspect, the disclosure provides an oligonucleotide compound comprising 15 to 35 bases in length, comprising a sequence substantially complementary to an Angiotensin I Converting Enzyme 2 (ACE2) nucleic acid sequence of any one of the 45-nucleotide target gene regions in Table 1 ID or Table 12C.

[0019] In certain embodiments, the oligonucleotide compound comprises a sequence substantially complementary to an ACE2 nucleic acid sequence of any one of the 45-nucleotide target gene regions of ACE2_119, ACE2_336, ACE2_349, ACE_1034, ACE_1775, ACE_784, ACE_908, and ACE_1071, as recited in Table 12C

[0020] In another aspect, the disclosure provides an oligonucleotide compound comprising 15 to 35 bases in length, comprising a sequence substantially complementary to a FURIN nucleic acid sequence of any one of the 45-nucleotide target gene regions in Table 1 IC or Table 12D.

[0021] In certain embodiments, the oligonucleotide compound comprises a sequence substantially complementary to a FURIN nucleic acid sequence of any one of the 45-nucleotide target gene regions of FURIN_443, FURIN_1959, FURIN_2711, FURIN_2712, FURIN_3524, and FURIN_3526, as recited in Table 12D.

[0022] In one aspect, the disclosure provides an oligonucleotide compound comprising 15 to 35 bases in length, comprising a sequence substantially complementary to an Interleukin 6 (IL-6) nucleic acid sequence of any one of the 45-nucleotide target gene regions in Table 11B or Table 12B.

[0023] In one aspect, the disclosure provides an oligonucleotide compound comprising 15 to 35 bases in length, comprising a sequence substantially complementary to an Interleukin 6 Receptor (IL-6R) nucleic acid sequence of any one of the 45-nucleotide target gene regions in Table 12E.

[0024] In one aspect, the disclosure provides an oligonucleotide compound comprising 15 to 35 bases in length, comprising a sequence substantially complementary to a Transmembrane Serine Protease 2 (TMPRSS2) nucleic acid sequence of any one of the 45-nucleotide target gene regions in Table 11A or Table 12A.

[0025] In certain embodiments, the oligonucleotide compound comprises one or more naturally occurring nucleotides.

[0026] In certain embodiments, the oligonucleotide compound comprises one or more modified nucleotide.

[0027] In certain embodiments, the one or more modified nucleotides each independently comprise a modification of a ribose group, a phosphate group, a nucleobase, or a combination thereof.

[0028] In certain embodiments, each modification of the ribose group is independently selected from the group consisting of 2′-O-methyl, 2′-fluoro, 2′-deoxy, 2′-O-(2-methoxyethyl) (MOE), 2′-O-alkyl, 2′-O-alkoxy, 2′-O-alkylamino, 2′-NH₂, and a constrained nucleotide.

[0029] In certain embodiments, the constrained nucleotide is selected from the group consisting of a locked nucleic acid (LNA), an ethyl-constrained nucleotide, a 2′-(S)-constrained ethyl (S-cEt) nucleotide, a constrained MOE, a 2′-O,4′-C-aminomethylene bridged nucleic acid (2′,4′-BNA^{NC}), an alpha-L-locked nucleic acid, a tricyclo-DNA, and any combination thereof.

[0030] In certain embodiments, the constrained nucleotide is a locked nucleic acid (LNA), a 2′-(S)-constrained ethyl (S-cEt) nucleotide, and a combination thereof

[0031] In certain embodiments, each modification of the nucleobase group is independently selected from the group consisting of 2-thiouridine, 4-thiouridine, N⁶-methyladenosine, pseudouridine, 2,6-diaminopurine, inosine, thymidine, 5-methylcytosine, 5-substituted pyrimidine, isoguanine, isocytosine, and halogenated aromatic groups.

[0032] In certain embodiments, each modification of the phosphate group is independently selected from the group consisting of a phosphorothioate, phosphonoacetate (PACE), thiophosphonoacetate (thioPACE), amide, triazole, phosphonate, and phosphotriester modification.

[0033] In certain embodiments, the modification of the phosphate group is phosphorothioate

[0034] In certain embodiments, the oligonucleotide compound comprises 4-16 phosphorothioate modifications. In certain embodiments, the oligonucleotide compound comprises 6-13 phosphorothioate modifications.

[0035] In certain embodiments, the oligonucleotide compound comprises at least one modified internucleotide linkage.

[0036] In certain embodiments, the oligonucleotide compound comprises at least one modified internucleotide linkage of Formula I:

[chemical structure]

wherein:
B is a base pairing moiety;
W is selected from the group consisting of O, OCH₂, OCH, CH₂, and CH;
X is selected from the group consisting of halo, hydroxy, and C₁₋₆ alkoxy;
Y is selected from the group consisting of O—, OH, OR, NH—, NH₂, S—, and SH;
Z is selected from the group consisting of O and CH₂;
R is a protecting group; and [symbol]
is an optional double bond.

[0037] In certain embodiments, the oligonucleotide compound comprises at least 80% chemically modified nucleotides. In certain embodiments, the oligonucleotide compound is fully chemically modified.

[0038] In certain embodiments, the oligonucleotide compound comprises an antisense oligonucleotide or a double stranded (ds) RNA.

[0039] In certain embodiments, the dsRNA comprises an antisense strand and a sense strand. In certain embodiments, the antisense strand comprises about 15 nucleotides to 25 nucleotides in length. In certain embodiments, the sense strand comprises about 15 nucleotides to 25 nucleotides in length. In certain embodiments, the antisense strand is 20 nucleotides in length, 21 nucleotides in length, or 22 nucleotides in length. In certain embodiments, the sense strand is 15 nucleotides in length, 16 nucleotides in length, 18 nucleotides in length, or 20 nucleotides in length.

[0040] In certain embodiments, the dsRNA comprises a double-stranded region of 15 base pairs to 20 base pairs. In certain embodiments, the dsRNA comprises a double-stranded region of 15 base pairs, 16 base pairs, 18 base pairs, or 20 base pairs.

[0041] In certain embodiments, the dsRNA comprises a blunt-end. In certain embodiments, the dsRNA comprises at least one single stranded nucleotide overhang. In certain embodiments, the dsRNA comprises about a 2-nucleotide to 5-nucleotide single stranded nucleotide overhang. In certain embodiments, the dsRNA comprises a 2-nucleotide single stranded nucleotide overhang or a 5-nucleotide single stranded nucleotide overhang.

[0042] In certain embodiments, the dsRNA comprises at least 70% 2′-O-methyl nucleotide modifications.

[0043] In certain embodiments, the antisense strand comprises at least 70% 2′-O-methyl nucleotide modifications. In certain embodiments, the antisense strand comprises about 70% to 90% 2′-O-methyl nucleotide modifications. In certain embodiments, the sense strand comprises at least 65% 2′-O-methyl nucleotide modifications. In certain embodiments, the sense strand comprises 100% 2′-O-methyl nucleotide modifications.

[0044] In certain embodiments, the sense strand comprises one or more nucleotide mismatches between the antisense strand and the sense strand. In certain embodiments, the one or more nucleotide mismatches are present at positions 2, 6, and 12 from the 5′ end of sense strand. In certain embodiments, the nucleotide mismatches are present at positions 2, 6, and 12 from the 5′ end of the sense strand.

[0045] In certain embodiments, the antisense strand comprises a 5′ phosphate, a 5′-alkyl phosphonate, a 5′ alkylene phosphonate, or a 5′ alkenyl phosphonate. In certain embodiments, the antisense strand comprises a 5′ vinyl phosphonate.

[0046] In certain embodiments, the dsRNA comprises an antisense strand and a sense strand, each strand with a 5′ end and a 3′ end, wherein: (1) the antisense strand comprises a sequence substantially complementary to a SARS-CoV-2 nucleic acid sequence of any one of the 45-nucleotide target gene regions in Table 6A; (2) the antisense strand comprises alternating 2′-methoxy-ribonucleotides and 2′-fluoro-ribonucleotides; (3) the nucleotides at positions 2 and 14 from the 5′ end of the antisense strand are not 2′-methoxy-ribonucleotides; (4) the nucleotides at positions 1-2 to 1-7 from the 3′ end of the antisense strand are connected to each other via phosphorothioate internucleotide linkages; (5) a portion of the antisense strand is complementary to a portion of the sense strand; (6) the sense strand comprises alternating 2′-methoxy-ribonucleotides and 2′-fluoro-ribonucleotides; and (7) the nucleotides at positions 1-2 from the 5′ end of the sense strand are connected to each other via phosphorothioate internucleotide linkages.

[0047] In certain embodiments, the dsRNA comprises an antisense strand and a sense strand, each strand with a 5′ end and a 3′ end, wherein: (1) the antisense strand comprises a sequence substantially complementary to a SARS-CoV-2 nucleic acid sequence of any one of the 45-nucleotide target gene regions in Table 6A; (2) the antisense strand comprises at least 70% 2′-O-methyl modifications; (3) the nucleotides at positions 2, 6, 14, and 16 from the 5′ end of the antisense strand are not a 2′-methoxy-ribonucleotide; (4) the nucleotides at positions 1-2 to 1-7 from the 3′ end of the antisense strand are connected to each other via phosphorothioate internucleotide linkages; (5) a portion of the antisense strand is complementary to a portion of the sense strand; (6) the sense strand comprises at least 70% 2′-O-methyl modifications; (7) the nucleotides at positions 6, 7, 8 and 10 from the 5′ end of the sense strand are not a 2′-methoxy-ribonucleotide; and (8) the nucleotides at positions 1-2 from the 5′ end of the sense strand are connected to each other via phosphorothioate internucleotide linkages.

[0048] In certain embodiments, the dsRNA further comprises 1 to 5 internucleotide linkages of Formula I. In certain embodiments, the 3′ end of the antisense strand comprises 1 to 5 internucleotide linkages of Formula I. In certain embodiments, the 3′ end of the antisense strand comprises 4 consecutive internucleotide linkages of Formula I.

[0049] In certain embodiments, a functional moiety is linked to one or both of the 5′ end and 3′ end of the antisense strand. In certain embodiments, a functional moiety is linked to one or both of the 5′ end and 3′ end of the sense strand. In certain embodiments, a functional moiety is linked to the 3′ end of the sense strand.

[0050] In certain embodiments, the functional moiety comprises a hydrophobic moiety. In certain embodiments, the hydrophobic moiety is selected from the group consisting of fatty acids, steroids, secosteroids, lipids, gangliosides, nucleoside analogs, endocannabinoids, vitamins, and a mixture thereof. In certain embodiments, the steroid selected from the group consisting of cholesterol and Lithocholic acid (LCA). In certain embodiments, the fatty acid selected from the group consisting of Eicosapentaenoic acid (EPA), Docosahexaenoic acid (DHA) and Docosanoic acid (DCA). In certain embodiments, the vitamin is selected from the group consisting of choline, vitamin A, vitamin E, and derivatives or metabolites thereof. In certain embodiments, the vitamin is selected from the group consisting of retinoic acid and alpha-tocopheryl succinate.

[0051] In certain embodiments, the functional moiety is linked to one or both of the antisense strand and sense strand by a linker. In certain embodiments, the linker comprises a divalent or trivalent linker. In certain embodiments, the divalent or trivalent linker is selected from the group consisting of

[chemical structure]

wherein n is 1, 2, 3, 4, or 5.

[0052] In certain embodiments, the linker comprises an ethylene glycol chain, an alkyl chain, a peptide, an RNA, a DNA, a phosphodiester, a phosphorothioate, a phosphoramidate, an amide, a carbamate, or a combination thereof.

[0053] In certain embodiments, the linker comprises a dTdT dinucleotide.

[0054] In certain embodiments, the functional moiety is linked to the 3′ end of the sense strand by a dTdT dinucleotide followed by the linker

[chemical structure]

wherein n is 1.

[0055] In certain embodiments, the trivalent linker further links a phosphodiester or phosphodiester derivative.

[0056] In certain embodiments, the phosphodiester or phosphodiester derivative is selected from the group consisting of

[chemical structure]

wherein X is O, S or BH₃.

[0057] In certain embodiments, the nucleotides at positions 1 and 2 from the 5′ end of antisense strand are connected to adjacent ribonucleotides via phosphorothioate linkages.

[0058] In one aspect, the disclosure provides a double stranded (ds) RNA, comprising an antisense strand and a sense strand, each strand with a 5′ end and a 3′ end, wherein: (1) the antisense strand comprises a sequence substantially complementary to a SARS-CoV-2 nucleic acid sequence of any one of the 45-nucleotide target gene regions in Table 6A; (2) the antisense strand comprises at least 70% 2′-O-methyl modifications; (3) the nucleotides at positions 2, 6, 14, and 16 from the 5′ end of the antisense strand are not a 2′-methoxy-ribonucleotide; (4) the nucleotides at positions 1-2 to 1-7 from the 3′ end of the antisense strand are connected to each other via phosphorothioate internucleotide linkages; (5) a portion of the antisense strand is complementary to a portion of the sense strand; (6) the sense strand comprises at least 70% 2′-O-methyl modifications; (7) the nucleotides at positions 6, 7, 8 and 10 from the 5′ end of the sense strand are not a 2′-methoxy-ribonucleotide; (8) the nucleotides at positions 1-2 from the 5′ end of the sense strand are connected to each other via phosphorothioate internucleotide linkages; and (9) the antisense strand comprises at least one modified intersubunit linkages of Formula II:

[chemical structure]

wherein:
B is a base pairing moiety;
W is O or O(CH₂)ₙ¹, wherein n¹ is 1 to 10;
X is selected from the group consisting of H, OH, OR¹, F, SH, SR, NR²₂ and C₁₋₆-alkoxy;
Y is selected from the group consisting of O—, OH, OR, OR², NH—, NH₂, NR²₂, BH₃, S—, R¹, and SH;
Z is O or O(CH₂)ₙ² wherein n² is 1 to 10;
R¹ is alkyl, allyl or aryl; and
R² is alkyl, allyl or aryl.

[0059] In certain embodiments, the 3′ end of the antisense strand comprises four consecutive modified intersubunit linkages of Formula II.

[0060] In certain embodiments, the antisense strand comprises a 5′ vinyl phosphonate.

[0061] In certain embodiments, the antisense strand is 20 nucleotides in length, 21 nucleotides in length, or 22 nucleotides in length. In certain embodiments, the sense strand is 15 nucleotides in length, 16 nucleotides in length, 18 nucleotides in length, or 20 nucleotides in length.

[0062] In certain embodiments, a functional moiety is linked to the 3′ end of the sense strand.

[0063] In certain embodiments, the functional moiety comprises Eicosapentaenoic acid (EPA) or Docosanoic acid (DCA).

[0064] In certain embodiments, a functional moiety is linked to the 3′ end of the sense strand by a linker.

[0065] In certain embodiments, the linker comprises a dTdT dinucleotide.

[0066] In certain embodiments, the functional moiety is linked to the 3′ end of the sense strand by a dTdT dinucleotide followed by the linker

[chemical structure]

wherein n is 1.

[0067] In one aspect, the disclosure provides a combination comprising two or more oligonucleotide compounds or dsRNA recited above, wherein each oligonucleotide compound or dsRNA in the combination comprises complementarity to a different SARS-CoV-2 nucleic acid sequence.

[0068] In certain embodiments, the combination comprises two, three, four, or five oligonucleotide compounds or dsRNA.

[0069] In one aspect, the disclosure provides a combination comprising two or more oligonucleotide compounds for inhibiting the expression of a SARS-CoV-2 gene in a cell of an organism, wherein each oligonucleotide compound in the combination comprises complementarity to a different SARS-CoV-2 nucleic acid sequence.

[0070] In certain embodiments, the combination comprises a first oligonucleotide compound, a second oligonucleotide compound, and a third oligonucleotide compound, wherein:

i) the first oligonucleotide compound comprises a sequence substantially complementary to the 45-nucleotide target gene region orfla_416, as recited in Table 6A;
ii) the second oligonucleotide compound comprises a sequence substantially complementary to the 45-nucleotide target gene region orfla_9679, as recited in Table 6A; and
iii) the third oligonucleotide compound comprises a sequence substantially complementary to the 45-nucleotide target gene region orflab_21391, as recited in Table 6A; or
i) the first oligonucleotide compound comprises a sequence substantially complementary to the 45-nucleotide target gene region orfla_416, as recited in Table 6A;
ii) the second oligonucleotide compound comprises a sequence substantially complementary to the 45-nucleotide target gene region orfla_8744, as recited in Table 6A; and
iii) the third oligonucleotide compound comprises a sequence substantially complementary to the 45-nucleotide target gene region orflab_21391, as recited in Table 6A; or
i) the first oligonucleotide compound comprises a sequence substantially complementary to the 45-nucleotide target gene region orfla_9679, as recited in Table 6A;
ii) the second oligonucleotide compound comprises a sequence substantially complementary to the 45-nucleotide target gene region orfla_8744, as recited in Table 6A; and
iii) the third oligonucleotide compound comprises a sequence substantially complementary to the 45-nucleotide target gene region orflab_21391, as recited in Table 6A; or
i) the first oligonucleotide compound comprises a sequence substantially complementary to the 45-nucleotide target gene region orfla_416, as recited in Table 6A;
ii) the second oligonucleotide compound comprises a sequence substantially complementary to the 45-nucleotide target gene region orfla_9679, as recited in Table 6A; and
iii) the third oligonucleotide compound comprises a sequence substantially complementary to the 45-nucleotide target gene region 7a_27565, as recited in Table 6A; or
i) the first oligonucleotide compound comprises a sequence substantially complementary to the 45-nucleotide target gene region orfla_416, as recited in Table 6A;
ii) the second oligonucleotide compound comprises a sequence substantially complementary to the 45-nucleotide target gene region orflab_21391, as recited in Table 6A; and
iii) the third oligonucleotide compound comprises a sequence substantially complementary to the 45-nucleotide target gene region 7a_27565, as recited in Table 6A; or
i) the first oligonucleotide compound comprises a sequence substantially complementary to the 45-nucleotide target gene region orflab_21391, as recited in Table 6A;
ii) the second oligonucleotide compound comprises a sequence substantially complementary to the 45-nucleotide target gene region 7a_27656, as recited in Table 6A; and
iii) the third oligonucleotide compound comprises a sequence substantially complementary to the 45-nucleotide target gene region 7a_27751, as recited in Table 6A; or
i) the first oligonucleotide compound comprises a sequence substantially complementary to the 45-nucleotide target gene region orfla_416, as recited in Table 6A;
ii) the second oligonucleotide compound comprises a sequence substantially complementary to the 45-nucleotide target gene region S_23174, as recited in Table 6A; and
iii) the third oligonucleotide compound comprises a sequence substantially complementary to the 45-nucleotide target gene region E_26305, as recited in Table 6A; or
i) the first oligonucleotide compound comprises a sequence substantially complementary to the 45-nucleotide target gene region orfla_9679, as recited in Table 6A;
ii) the second oligonucleotide compound comprises a sequence substantially complementary to the 45-nucleotide target gene region S_23174, as recited in Table 6A; and
iii) the third oligonucleotide compound comprises a sequence substantially complementary to the 45-nucleotide target gene region N_29293, as recited in Table 6A; or
i) the first oligonucleotide compound comprises a sequence substantially complementary to the 45-nucleotide target gene region orflab_21391, as recited in Table 6A;
ii) the second oligonucleotide compound comprises a sequence substantially complementary to the 45-nucleotide target gene region E_26305, as recited in Table 6A; and
iii) the third oligonucleotide compound comprises a sequence substantially complementary to the 45-nucleotide target gene region N_29293, as recited in Table 6A; or
i) the first oligonucleotide compound comprises a sequence substantially complementary to the 45-nucleotide target gene region S_23174, as recited in Table 6A;
ii) the second oligonucleotide compound comprises a sequence substantially complementary to the 45-nucleotide target gene region E_26470, as recited in Table 6A; and
iii) the third oligonucleotide compound comprises a sequence substantially complementary to the 45-nucleotide target gene region 7a_27565, as recited in Table 6A; or
i) the first oligonucleotide compound comprises a sequence substantially complementary to the 45-nucleotide target gene region S_23174, as recited in Table 6A;
ii) the second oligonucleotide compound comprises a sequence substantially complementary to the 45-nucleotide target gene region M_27123, as recited in Table 6A; and
iii) the third oligonucleotide compound comprises a sequence substantially complementary to the 45-nucleotide target gene region 7a_27656, as recited in Table 6A; or
i) the first oligonucleotide compound comprises a sequence substantially complementary to the 45-nucleotide target gene region S_23174, as recited in Table 6A;
ii) the second oligonucleotide compound comprises a sequence substantially complementary to the 45-nucleotide target gene region M_27032, as recited in Table 6A; and
iii) the third oligonucleotide compound comprises a sequence substantially complementary to the 45-nucleotide target gene region 7a_27751, as recited in Table 6A; or
i) the first oligonucleotide compound comprises a sequence substantially complementary to the 45-nucleotide target gene region orfla_416, as recited in Table 6A;
ii) the second oligonucleotide compound comprises a sequence substantially complementary to the 45-nucleotide target gene region E_26305, as recited in Table 6A; and
iii) the third oligonucleotide compound comprises a sequence substantially complementary to the 45-nucleotide target gene region 7a_27565, as recited in Table 6A; or
i) the first oligonucleotide compound comprises a sequence substantially complementary to the 45-nucleotide target gene region orfla_9679, as recited in Table 6A;
ii) the second oligonucleotide compound comprises a sequence substantially complementary to the 45-nucleotide target gene region E_26369, as recited in Table 6A; and
iii) the third oligonucleotide compound comprises a sequence substantially complementary to the 45-nucleotide target gene region 7a_27656, as recited in Table 6A; or
i) the first oligonucleotide compound comprises a sequence substantially complementary to the 45-nucleotide target gene region orflab_21391, as recited in Table 6A;
ii) the second oligonucleotide compound comprises a sequence substantially complementary to the 45-nucleotide target gene region M_27032, as recited in Table 6A; and
iii) the third oligonucleotide compound comprises a sequence substantially complementary to the 45-nucleotide target gene region 7a_27751, as recited in Table 6A; or
i) the first oligonucleotide compound comprises a sequence substantially complementary to the 45-nucleotide target gene region 3a_25868, as recited in Table 6A;
ii) the second oligonucleotide compound comprises a sequence substantially complementary to the 45-nucleotide target gene region 7a_27751, as recited in Table 6A; and
iii) the third oligonucleotide compound comprises a sequence substantially complementary to the 45-nucleotide target gene region S_23774, as recited in Table 6A.

[0071] In one aspect, the disclosure provides a combination comprising one or more oligonucleotide compounds for inhibiting the expression of a SARS-CoV-2 gene and one or more oligonucleotide compounds for inhibiting the expression of one or more of an ACE2 gene, a FURIN gene, an IL-6 gene, a TMPRSS2 gene, and a IL-6R gene.

[0072] In one aspect, the disclosure provides a pharmaceutical composition for inhibiting the expression of one or more of a SARS-CoV-2 gene, an ACE2 gene, a FURIN gene, an IL-6 gene, a TMPRSS2 gene, and a IL-6R gene in a cell of an organism, comprising the oligonucleotide compound, dsRNA, or combination recited above and a pharmaceutically acceptable carrier.

[0073] In certain embodiments, the oligonucleotide compound, dsRNA, or combination inhibits the expression of one or more of the SARS-CoV-2 genes, the ACE2 gene, the FURIN gene, the IL-6 gene, the TMPRSS2 gene, and the IL-6R gene by at least 50%. In certain embodiments, the oligonucleotide compound, dsRNA, or combination inhibits the expression of one or more of the SARS-CoV-2 genes, the ACE2 gene, the FURIN gene, the IL-6 gene, the TMPRSS2 gene, and the IL-6R gene by at least 75%.

[0074] In one aspect, the disclosure provides a pharmaceutical composition for inhibiting the expression of one or more SARS-CoV-2 genes in a cell of an organism, comprising the oligonucleotide compound, dsRNA, or combination recited above and a pharmaceutically acceptable carrier.

[0075] In certain embodiments, the oligonucleotide compound, dsRNA, or combination inhibits the expression of one or more SARS-CoV-2 genes by at least 50%. In certain embodiments, the oligonucleotide compound, dsRNA, or combination inhibits the expression of one or more SARS-CoV-2 genes by at least 75%.

[0076] In one aspect, the disclosure provides a method for inhibiting expression of a SARS-CoV-2 gene in a cell of an organism, the method comprising: (a) introducing into the cell an oligonucleotide compound, dsRNA, or combination recited above; and (b) maintaining the cell produced in step (a) for a time sufficient to obtain degradation of the mRNA transcript of the SARS-CoV-2 gene, thereby inhibiting expression of the SARS-CoV-2 gene in the cell.

[0077] In one aspect, the disclosure provides a method for inhibiting expression of one or more of a SARS-CoV-2 gene, an ACE2 gene, a FURIN gene, an IL-6 gene, a TMPRSS2 gene, and an IL-6R gene in a cell, the method comprising: (a) introducing into the cell an oligonucleotide compound, dsRNA, or combination recited above; and (b) maintaining the cell produced in step (a) for a time sufficient to obtain degradation of the mRNA transcript of the SARS-CoV-2 gene, the ACE2 gene, the FURIN gene, the IL-6 gene, the TMPRSS2 gene, and the IL-6R gene thereby inhibiting expression of the SARS-CoV-2 gene, the ACE2 gene, the FURIN gene, the IL-6 gene, the TMPRSS2 gene, and the IL-6R gene in the cell.

[0078] In one aspect, the disclosure provides a method of treating or managing a SARS-CoV-2 infection, comprising administering to a patient in need of such treatment a therapeutically effective amount of the oligonucleotide compound, dsRNA, or combination recited above.

[0079] In certain embodiments, the oligonucleotide compound, dsRNA, or combination is administered by intratracheal (IT) injection, intravenous (IV) injection, subcutaneous (SQ) injection, or a combination thereof.

[0080] In certain embodiments, the oligonucleotide compound, dsRNA, or combination is administered sequentially or simultaneously.

[0081] In certain embodiments, administering the oligonucleotide compound, dsRNA, or combination causes a decrease in one or more of SARS-CoV-2 gene mRNA, ACE2 gene mRNA, FURIN gene mRNA, IL-6 gene mRNA, TMPRSS2 gene mRNA, and IL-6R gene mRNA in the lung.

[0082] In certain embodiments, the oligonucleotide compound, dsRNA, or combination inhibits the expression of one or more of the SARS-CoV-2 gene, the ACE2 gene, the FURIN gene, the IL-6 gene, the TMPRSS2 gene, and the IL-6R gene by at least 50%. In certain embodiments, the oligonucleotide compound, dsRNA, or combination inhibits the expression of one or more of the SARS-CoV-2 gene, the ACE2 gene, the FURIN gene, the IL-6 gene, the TMPRSS2 gene, and the IL-6R gene by at least 75%.

[0083] In one aspect, the disclosure provides a vector comprising a regulatory sequence operably linked to a nucleotide sequence that encodes an oligonucleotide compound recited above.

[0084] In certain embodiments of the vector, the oligonucleotide compound inhibits the expression of one or more of the SARS-CoV-2 gene, the ACE2 gene, the FURIN gene, the IL-6 gene, the TMPRSS2 gene, and the IL-6R gene by at least 30%. In certain embodiments of the vector, the oligonucleotide compound inhibits the expression of one or more of the SARS-CoV-2 gene, the ACE2 gene, the FURIN gene, the IL-6 gene, the TMPRSS2 gene, and the IL-6R gene by at least 50%. In certain embodiments of the vector, the oligonucleotide compound inhibits the expression of one or more of the SARS-CoV-2 gene, the ACE2 gene, the FURIN gene, the IL-6 gene, the TMPRSS2 gene, and the IL-6R gene by at least 75%.

[0085] In one aspect, the disclosure provides a cell comprising the vector recited above.

[0086] In one aspect, the disclosure provides a recombinant adeno-associated virus (rAAV) comprising the vector recited above and an AAV capsid.

[0087] In one aspect, the disclosure provides a branched oligonucleotide compound comprising two or more of the oligonucleotide compounds or dsRNA recited above covalently bound to one another.

[0088] In certain embodiments, the oligonucleotide compounds are covalently bound to one another by way of a linker, spacer, a branching point, or a mixture thereof.

[0089] In one aspect, the disclosure provides a method of treating or managing a SARS-CoV-2 infection, comprising administering to a patient in need of such treatment a therapeutically effective amount of the branched oligonucleotide compound recited above.

[0090] In certain embodiments, the branched oligonucleotide compound is administered by intratracheal (IT) injection, intravenous (IV) injection, subcutaneous (SQ) injection, or a combination thereof.

[0091] In certain embodiments, the branched oligonucleotide compound accumulates in lung tissue to a greater extent than a non-branched oligonucleotide compound when administered by intratracheal (IT) injection.

[0092] In one aspect, the disclosure provides a branched RNA compound comprising: two or more RNA molecules comprising 15 to 35 nucleotides in length, and a sequence substantially complementary to a SARS-CoV-2 nucleic acid sequence, wherein the two or more RNA molecules are connected to one another by one or more moieties independently selected from a linker, a spacer and a branching point.

[0093] In certain embodiments, the branched RNA compound comprises a sequence substantially complementary to a SARS-CoV-2 nucleic acid sequence of any one of the 45-nucleotide target gene regions in Table 6A.

[0094] In certain embodiments of the branched RNA compound, each RNA molecule comprises 15 to 25 nucleotides in length.

[0095] In certain embodiments of the branched RNA compound, each RNA molecule comprises a dsRNA comprising a sense strand and an antisense strand, wherein each antisense strand independently comprises a sequence substantially complementary to a SARS-CoV-2 nucleic acid sequence of any one of the 45-nucleotide target gene regions in Table 6A.

[0096] In certain embodiments, the branched RNA compound comprises complementarity to at least 10, 11, 12 or 13 contiguous nucleotides of a SARS-CoV-2 nucleic acid sequence of any one of the 45-nucleotide target gene regions in Table 6A. In certain embodiments of the branched RNA compound, each RNA molecule comprises no more than 3 mismatches with a SARS-CoV-2 nucleic acid sequence of any one of the 45-nucleotide target gene regions in Table 6A. In certain embodiments, the branched RNA compound comprises full complementary to a SARS-CoV-2 nucleic acid sequence of any one of the 45-nucleotide target gene regions in Table 6A.

[0097] In certain embodiments of the branched RNA compound, the antisense strand comprises a portion having the nucleic acid sequence of any one of the antisense strands recited in Table 6B.

[0098] In certain embodiments of the branched RNA compound, the antisense strand and/or sense strand comprises about 15 nucleotides to 25 nucleotides in length. In certain embodiments of the branched RNA compound, the antisense strand is 20 nucleotides in length, 21 nucleotides in length, or 22 nucleotides in length. In certain embodiments of the branched RNA compound, the sense strand is 15 nucleotides in length, 16 nucleotides in length, 18 nucleotides in length, or 20 nucleotides in length.

[0099] In certain embodiments of the branched RNA compound, the dsRNA comprises a double-stranded region of 15 base pairs to 20 base pairs. In certain embodiments of the branched RNA compound, the dsRNA comprises a double-stranded region of 15 base pairs, 16 base pairs, 18 base pairs, or 20 base pairs.

[0100] In certain embodiments of the branched RNA compound, the dsRNA comprises a blunt-end. In certain embodiments of the branched RNA compound, the dsRNA comprises at least one single stranded nucleotide overhang. In certain embodiments of the branched RNA compound, the dsRNA comprises between a 2-nucleotide to 5-nucleotide single stranded nucleotide overhang.

[0101] In certain embodiments of the branched RNA compound, the dsRNA comprises naturally occurring nucleotides.

[0102] In certain embodiments of the branched RNA compound, the dsRNA comprises at least one modified nucleotide.

[0103] In certain embodiments of the branched RNA compound, the modified nucleotide comprises a 2′-O-methyl modified nucleotide, a 2′-deoxy-2′-fluoro modified nucleotide, a 2′-deoxy-modified nucleotide, a locked nucleotide, an abasic nucleotide, a 2′-amino-modified nucleotide, a 2′-alkyl-modified nucleotide, a morpholino nucleotide, a phosphoramidate, or a non-natural base comprising nucleotide.

[0104] In certain embodiments of the branched RNA compound, the dsRNA comprises at least one modified internucleotide linkage. In certain embodiments of the branched RNA compound, the modified internucleotide linkage comprises a phosphorothioate internucleotide linkage. In certain embodiments, the branched RNA compound comprises 4-16 phosphorothioate internucleotide linkages. In certain embodiments, the branched RNA compound comprises 6-13 phosphorothioate internucleotide linkages.

[0105] In certain embodiments of the branched RNA compound, the dsRNA comprises at least one modified internucleotide linkage of Formula I:

[chemical structure]

wherein:
B is a base pairing moiety;
W is selected from the group consisting of O, OCH₂, OCH, CH₂, and CH;
X is selected from the group consisting of halo, hydroxy, and C₁₋₆ alkoxy;
Y is selected from the group consisting of O—, OH, OR, NH—, NH₂, S—, and SH;
Z is selected from the group consisting of O and CH₂;
R is a protecting group; and [symbol]
is an optional double bond.

[0106] In certain embodiments of the branched RNA compound, the dsRNA comprises at least 80% chemically modified nucleotides. In certain embodiments of the branched RNA compound, the dsRNA is fully chemically modified. In certain embodiments of the branched RNA compound, the dsRNA comprises at least 70% 2′-O-methyl nucleotide modifications. In certain embodiments of the branched RNA compound, the antisense strand comprises at least 70% 2′-O-methyl nucleotide modifications. In certain embodiments of the branched RNA compound, the antisense strand comprises about 70% to 90% 2′-O-methyl nucleotide modifications. In certain embodiments of the branched RNA compound, the sense strand comprises at least 65% 2′-O-methyl nucleotide modifications. In certain embodiments of the branched RNA compound, the sense strand comprises 100% 2′-O-methyl nucleotide modifications.

[0107] In certain embodiments of the branched RNA compound, the sense strand comprises one or more nucleotide mismatches between the antisense strand and the sense strand. In certain embodiments of the branched RNA compound, the one or more nucleotide mismatches are present at positions 2, 6, and 12 from the 5′ end of sense strand. In certain embodiments of the branched RNA compound, the nucleotide mismatches are present at positions 2, 6, and 12 from the 5′ end of the sense strand.

[0108] In certain embodiments of the branched RNA compound, the antisense strand comprises a 5′ phosphate, a 5′-alkyl phosphonate, a 5′ alkylene phosphonate, a 5′ alkenyl phosphonate, or a mixture thereof. In certain embodiments of the branched RNA compound, the antisense strand comprises a 5′ vinyl phosphonate.

[0109] In certain embodiments of the branched RNA compound, the dsRNA comprises an antisense strand and a sense strand, each strand with a 5′ end and a 3′ end, wherein: (1) the antisense strand comprises a sequence substantially complementary to a SARS-CoV-2 nucleic acid sequence of any one of the 45-nucleotide target gene regions in Table 6A; (2) the antisense strand comprises at least 70% 2′-O-methyl modifications; (3) the nucleotides at positions 2, 6, 14, and 16 from the 5′ end of the antisense strand are not 2′-methoxy-ribonucleotides; (4) the nucleotides at positions 1-2 to 1-7 from the 3′ end of the antisense strand are connected to each other via phosphorothioate internucleotide linkages; (5) a portion of the antisense strand is complementary to a portion of the sense strand; (6) the sense strand comprises at least 70% 2′-O-methyl modifications; (7) the nucleotides at positions 7, 9, 10, and 11 from the 3′ end of the sense strand are not 2′-methoxy-ribonucleotides; and (8) the nucleotides at positions 1-2 from the 5′ end of the sense strand are connected to each other via phosphorothioate internucleotide linkages.

[0110] In certain embodiments of the branched RNA compound, the antisense strand comprises a 5′ vinyl phosphonate.

[0111] In certain embodiments of the branched RNA compound, the antisense strand is 20 nucleotides in length, 21 nucleotides in length, or 22 nucleotides in length. In certain embodiments of the branched RNA compound, the sense strand is 15 nucleotides in length, 16 nucleotides in length, 18 nucleotides in length, or 20 nucleotides in length.

[0112] In certain embodiments of the branched RNA compound, a functional moiety is linked to one or both of the 5′ end and 3′ end of the antisense strand. In certain embodiments of the branched RNA compound, a functional moiety is linked to one or both of the 5′ end and 3′ end of the sense strand. In certain embodiments of the branched RNA compound, a functional moiety is linked to the 3′ end of the sense strand.

[0113] In certain embodiments of the branched RNA compound, the functional moiety comprises a hydrophobic moiety. In certain embodiments of the branched RNA compound, the hydrophobic moiety is selected from the group consisting of fatty acids, steroids, secosteroids, lipids, gangliosides, nucleoside analogs, endocannabinoids, vitamins, and a mixture thereof. In certain embodiments of the branched RNA compound, the steroid is selected from the group consisting of cholesterol and Lithocholic acid (LCA). In certain embodiments of the branched RNA compound, the fatty acid is selected from the group consisting of Eicosapentaenoic acid (EPA), Docosahexaenoic acid (DHA) and Docosanoic acid (DCA). In certain embodiments of the branched RNA compound, the vitamin is selected from the group consisting of choline, vitamin A, vitamin E, derivatives thereof, and metabolites thereof. In certain embodiments of the branched RNA compound, the vitamin is selected from the group consisting of retinoic acid and alpha-tocopheryl succinate.

[0114] In certain embodiments of the branched RNA compound, the functional moiety is linked to one or both of the antisense strand and sense strand by a linker. In certain embodiments of the branched RNA compound, the linker comprises a divalent or trivalent linker.

[0115] In certain embodiments of the branched RNA compound, the divalent or trivalent linker is selected from the group consisting of:

[chemical structure]

wherein n is 1, 2, 3, 4, or 5.

[0116] In certain embodiments of the branched RNA compound, the linker comprises an ethylene glycol chain, an alkyl chain, a peptide, an RNA, a DNA, a phosphodiester, a phosphorothioate, a phosphoramidate, an amide, a carbamate, or a combination thereof.

[0117] In certain embodiments of the branched RNA compound, the trivalent linker further links a phosphodiester or phosphodiester derivative. In certain embodiments of the branched RNA compound, the phosphodiester or phosphodiester derivative is selected from the group consisting of:

[chemical structure]

wherein X is O, S or BH₃.

[0118] In certain embodiments of the branched RNA compound, the nucleotides at positions 1 and 2 from the 3′ end of sense strand, and the nucleotides at positions 1 and 2 from the 5′ end of antisense strand, are connected to adjacent ribonucleotides via phosphorothioate linkages.

[0119] In one aspect, the disclosure provides compound of formula (I):

L-(N)ₙ (I)

wherein:
L comprises an ethylene glycol chain, an alkyl chain, a peptide, an RNA, a DNA, a phosphate, a phosphonate, a phosphoramidate, an ester, an amide, a triazole, or combinations thereof, and wherein formula (I) optionally further comprises one or more branch point B, and one or more spacer S, wherein
B is independently for each occurrence a polyvalent organic species or derivative thereof;
S comprises independently for each occurrence an ethylene glycol chain, an alkyl chain, a peptide, an RNA, a DNA, a phosphate, a phosphonate, a phosphoramidate, an ester, an amide, a triazole, or a combination thereof; and
N is a double stranded nucleic acid comprising 15 to 35 bases in length comprising a sense strand and an antisense strand; wherein
the antisense strand comprises a sequence substantially complementary to a SARS-CoV-2 nucleic acid sequence of any one of the 45-nucleotide target gene regions in Table 6A;
the sense strand and antisense strand each independently comprise one or more chemical modifications; and
n is 2, 3, 4, 5, 6, 7 or 8.

[0120] In certain embodiments, the compound has a structure selected from formulas (I-1)-(I-9):

[chemical structure]

[chemical structure]

[0121] In certain embodiments, the antisense strand comprises a 5′ terminal group R selected from the group consisting of:

[chemical structure]

[chemical structure]

[0122] In certain embodiments, the compound comprises the structure of formula (II):

[chemical structure]

wherein:
X, for each occurrence, independently, is selected from adenosine, guanosine, uridine, cytidine, and chemically-modified derivatives thereof;
Y, for each occurrence, independently, is selected from adenosine, guanosine, uridine, cytidine, and chemically-modified derivatives thereof;
- represents a phosphodiester internucleoside linkage;
= represents a phosphorothioate internucleoside linkage; and
--- represents, individually for each occurrence, a base-pairing interaction or a mismatch.

[0123] In certain embodiments, the compound comprises structure of formula (IV):

[chemical structure]

wherein:
X, for each occurrence, independently, is selected from adenosine, guanosine, uridine, cytidine, and chemically-modified derivatives thereof;
Y, for each occurrence, independently, is selected from adenosine, guanosine, uridine, cytidine, and chemically-modified derivatives thereof;
- represents a phosphodiester internucleoside linkage;
= represents a phosphorothioate internucleoside linkage; and
--- represents, individually for each occurrence, a base-pairing interaction or a mismatch.

[0124] In certain embodiments, L is structure L1:

[chemical structure]

[0125] In certain embodiments, R is R³ and n is 2.

[0126] In certain embodiments, L is structure L2:

[chemical structure]

[0127] In certain embodiments, R is R³ and n is 2.

[0128] In one aspect, the disclosure provides a delivery system for therapeutic nucleic acids having the structure of Formula (VI):

L-(cNA)ₙ (VI)

wherein:
L comprises an ethylene glycol chain, an alkyl chain, a peptide, an RNA, a DNA, a phosphate, a phosphonate, a phosphoramidate, an ester, an amide, a triazole, or combinations thereof, wherein formula (VI) optionally further comprises one or more branch point B, and one or more spacer S, wherein
B comprises independently for each occurrence a polyvalent organic species or a derivative thereof;
S comprises independently for each occurrence an ethylene glycol chain, an alkyl chain, a peptide, RNA, DNA, a phosphate, a phosphonate, a phosphoramidate, an ester, an amide, a triazole, or combinations thereof;
each cNA, independently, is a carrier nucleic acid comprising one or more chemical modifications;
each cNA, independently, comprises at least 15 contiguous nucleotides of a SARS-CoV-2 nucleic acid sequence of any one of the 45-nucleotide target gene regions in Table 6A; and
n is 2, 3, 4, 5, 6, 7 or 8.

[0129] In certain embodiments, the delivery system has a structure selected from formulas (VI-1)-(VI-9):

[chemical structure]

[0130] In certain embodiments, each cNA independently comprises a chemically-modified nucleotide.

[0131] In certain embodiments, the delivery system further comprises n therapeutic nucleic acids (NA), wherein each NA is hybridized to at least one cNA.

[0132] In certain embodiments, each NA independently comprises at least 16 contiguous nucleotides. In certain embodiments, each NA independently comprises 16-20 contiguous nucleotides.

[0133] In certain embodiments, each NA comprises an unpaired overhang of at least 2 nucleotides. In certain embodiments, the nucleotides of the overhang are connected via phosphorothioate linkages.

[0134] In certain embodiments, each NA, independently, is selected from the group consisting of DNAs, siRNAs, antagomiRs, miRNAs, gapmers, mixmers, and guide RNAs.

[0135] In certain embodiments, each NA is substantially complementary to a SARS-CoV-2 nucleic acid sequence of any one of the 45-nucleotide target gene regions in Table 6A.

[0136] In one aspect, the disclosure provides a pharmaceutical composition for inhibiting the expression of a SARS-CoV-2 gene in an organism, comprising a compound or a system recited above, and a pharmaceutically acceptable carrier.

[0137] In certain embodiments, the compound or system inhibits the expression of the SARS-CoV-2 gene by at least 50%. In certain embodiments, the compound or system inhibits the expression of the SARS-CoV-2 gene by at least 75%.

[0138] In one aspect, the disclosure provides a method for inhibiting expression of a SARS-CoV-2 gene in a cell, the method comprising: (a) introducing into the cell a compound or a system recited above; and (b) maintaining the cell produced in step (a) for a time sufficient to obtain degradation of the mRNA transcript of the SARS-CoV-2 gene, thereby inhibiting expression of the SARS-CoV-2 gene in the cell.

[0139] In one aspect, the disclosure provides a method of treating or managing a SARS-CoV-2 infection comprising administering to a patient in need of such treatment or management a therapeutically effective amount of a compound or a system recited above.

[0140] In certain embodiments, the compound or system is administered to the lung of the patient.

[0141] In certain embodiments, the compound or system is administered by intratracheal (IT) injection, intravenous (IV) injection, subcutaneous (SQ) injection, or a combination thereof.

[0142] In certain embodiments, administering the compound or system causes a decrease in SARS-CoV-2 gene mRNA in one or more of the club cells and alveoli cells of the lung.

[0143] In certain embodiments, the compound or system inhibits the expression of the SARS-CoV-2 gene by at least 50%. In certain embodiments, the compound or system inhibits the expression of the SARS-CoV-2 gene by at least 75%.

[0144] In certain embodiments, the compound or system accumulates in lung tissue to a greater extent than a non-branched oligonucleotide compound when administered by intratracheal (IT) injection.

[0145] In one aspect, the disclosure provides a method of delivering an oligonucleotide compound to the lung of a patient, comprising administering the oligonucleotide compound, wherein the oligonucleotide compound is conjugated to a functional moiety selected from Eicosapentaenoic acid (EPA) and Docosanoic acid (DCA).

[0146] In certain embodiments, the oligonucleotide compound is a dsRNA comprising an antisense strand and a sense strand, each strand with a 5′ end and a 3′ end. In certain embodiments, the dsRNA is conjugated to the sense strand 3′ end.

[0147] In certain embodiments, the functional moiety is conjugated to the sense strand by a linker. In certain embodiments, the linker comprises a divalent or trivalent linker.

[0148] In certain embodiments, the divalent or trivalent linker is selected from the group consisting of:

[chemical structure]

wherein n is 1, 2, 3, 4, or 5.

[0149] In certain embodiments, the linker comprises an ethylene glycol chain, an alkyl chain, a peptide, an RNA, a DNA, a phosphodiester, a phosphorothioate, a phosphoramidate, an amide, a carbamate, or a combination thereof.

[0150] In certain embodiments, the trivalent linker further links a phosphodiester or phosphodiester derivative.

[0151] In certain embodiments, the phosphodiester or phosphodiester derivative is selected from the group consisting of:

[chemical structure]

wherein X is O, S or BH₃.

### BRIEF DESCRIPTION OF THE DRAWINGS

[0152] The foregoing and other features and advantages of the present disclosure will be more fully understood from the following detailed description of illustrative embodiments taken in conjunction with the accompanying drawings.

[0153] FIG. 1A-1B depict an exemplary chemically modified siRNA (FIG. 1A), and a schematic of the SARS-CoV-2 genome (FIG. 1B).

[0154] FIG. 2 depicts a diagram of siRNA and ASO target positions on encoded proteins in the SARS-CoV-2 Genome. siRNAs were designed to target nine genes encoding SARS-CoV-2 proteins: orfla, orflab, spike surface glycoprotein (S), small envelope protein (E), matrix protein (M), nucleocapsid protein (N), and accessory proteins 3a, 8b, 7a. Grey arrows indicate siRNA and ASO target positions. Inset shows detailed view of siRNA target positions on genes in the 3′ region of the genome.

[0155] FIG. 3A-3B depict an alignment of siRNAs and ASOs selected for synthesis directed to six closely-related CoVs using a novel algorithm. Aligned genome regions of CoVs are shaded based on homology with darker coloring indicating higher homology with respect to SARS-CoV-2. The siRNA position is indicated on the top. Per position percent homology of SARS-CoV-2 to the six related CoVs is plotted on the bottom. SiRNA with low homology scores of 59 are shown in FIG. 3A (SEQ ID NOS 2583-2589, respectively, in order of appearance). SiRNA with a high homology score are shown in FIG. 3B (SEQ ID NOS 2590-2596, respectively, in order of appearance). Gaps in alignment are indicated with dashes (-).

[0156] FIG. 4A-4B depict siRNA and ASO target selection based on the ability to target many SARS-CoV-2 genomes from patient isolates. FIG. 4A, siRNAs and ASOs were selected to target regions of the 9 selection genes with low mutation rates in other coronaviruses. FIG. 4B, the proportion of SARS-CoV-2 variants from patient isolates targeted by all selected siRNAs. FIG. FIG. 5A-5I depicts the identification of siRNA hits for SARS-CoV-2. SiRNAs targeting different genes in the SARS-CoV-2 genome were tested for silencing efficacy.

[0157] FIG. 5A, gene orfla, FIG. 5B, gene 3a; FIG. 5C, gene 7a, FIG. 5D, gene orflab, FIG. 5E, gene E, FIG. 5F, gene 8b, FIG. 5G, gene S, FIG. 5H, gene M, FIG. 5I, gene N. SiRNAs were tested in Hela cells and silencing was assessed using the psi-check reporter system. Concentration: 1.5 uM; Time point: 72 hours.

[0158] FIG. 6A-6I depict the identification of ASO hits for SARS-CoV-2. ASOs targeting different genes in the SARS-CoV2 genome were tested for silencing efficacy. FIG. 6A, gene orfla, FIG. 6B, gene Orflab; FIG. 6C, gene S, FIG. 6D, gene 3a, FIG. 6E, gene E, FIG. 6F, gene M, FIG. 6G, gene 7a, FIG. 6H, gene 8b, FIG. 6I, gene N. ASOs were tested in Hela cells and silencing was assessed using the psi-check reporter system. Concentration: 1.5 uM; Time point: 72 hours.

[0159] FIG. 7A-7B depict the identification of siRNA hits for SARS-CoV2 and mapping onto genes in the SARS-CoV-2 genome. FIG. 7A, SARS-CoV-2 genome. FIG. 7B, siRNAs targeting different genes in the SARS-CoV2 genome tested for silencing efficacy. siRNAs were tested in Hela cells and silencing was assessed using the psi-check reporter system. Concentration: 1.5 uM; Time point: 72 hours.

[0160] FIG. 8A-8B depicts the identification of ASO hits for SARS-CoV-2 and mapping onto genes in the SARS-CoV-2 genome. FIG. 8A, SARS-CoV-2 genome. FIG. 8B, LNA gapmers targeting different genes in the SARS-CoV-2 genome were tested for silencing efficacy. ASOs were tested in Hela cells and silencing was assessed using the psi-check reporter system. Concentration: 1.5 μM; Time point: 72 hours.

[0161] FIG. 9A-9I depict the validation and determination of IC₅₀ values. SiRNAs targeting different genes in the SARS-CoV-2 genome were tested for silencing efficacy in 8-point dose response studies. FIG. 9A, gene orfla, FIG. 9B, gene Orflab; FIG. 9C, gene Spike, FIG. 9D, gene 3a, FIG. 9E, gene Envelope, FIG. 9F, gene Membrane, FIG. 9G, gene Orf7a, FIG. 9H, gene Orf8a, FIG. 9I, gene Nucleocapsid. siRNAs were tested in Hela cells and silencing was assessed using the psi-check reporter system. Concentration: Top=1.5 μM; Time point: 72 hours.

[0162] FIG. 10 depicts a schematic showing SARS-CoV-2 genes and their functions. Non-structural genes undergo primary translation while structural and accessory proteins are translated from sub-genomic mRNAs.

[0163] FIG. 11A-11E depict validation and determination of IC₅₀ values for siRNA cocktails targeting SARS-CoV-2 Genes. FIG. 11A, replication cocktails; FIG. 11B, Replication/immuno cocktails; FIG. 11C, Replication/Capsid cocktails; FIG. 11D, Immuno/Capsid cocktails; and FIG. 11E, Replication/Immuno/Capsid cocktails. siRNAs were tested in Hela cells and silencing was assessed using the psi-check reporter system. Concentration: Top=1.5 uM; Time point: 72 hours.

[0164] FIG. 12A-12B depict design of siRNAs targeting ACE2 (FIG. 12A) and FURIN (FIG. 12B).

[0165] FIG. 13A-13B depict the identification of siRNA hits for ACE2 (FIG. 13A) and FURIN (FIG. 13B). siRNAs were tested in human Hacat cells and silencing was assessed using the QuantiGene assay and confirmed using psicheck reporter system. Concentration: 1.5 μM; Time point: 72 hours.

[0166] FIG. 14A-14B depict validation and determination of IC₅₀ values for siRNAs targeting ACE2 (FIG. 14A) and FURIN (FIG. 14B). siRNAs were tested in Hela cells and silencing was assessed using the psi-check reporter system. Concentration: Top=1.5 μM; Time point: 72 hours.

[0167] FIG. 15A-15D depict validation and determination of IC₅₀ values for siRNAs targeting FURIN. FIG. 15A, 2711; FIG. 15B, 2712; FIG. 15C, 3524; FIG. 15D, 3526. siRNAs were tested in HaCat cells and silencing was assessed using QuantiGene. Concentration: Top=1.5 μM; Time point: 72 hours.

[0168] FIG. 16A-16B depict the identification of ASO hits for ACE2 and FURIN. Twelve LNA gapmers targeting ACE2 (FIG. 16A) and FURIN (FIG. 16B) were tested for silencing efficacy. ASOs were tested in human U20S cells and silencing was assessed using QRT-PCR assay. Concentration: 1.5 μM; Time point: 72 hours.

[0169] FIG. 17A-17B depict the identification of ASO hits for ACE2 and FURIN. Twelve LNA gapmers targeting ACE2 (FIG. 17A) and FURIN (FIG. 17B), were tested for silencing efficacy. ASOs were tested in human U20S cells and silencing was assessed using QRT-PCR assay. Concentration: 1.5 μM; Time point: 72 hours.

[0170] FIG. 18A-18B depict validation and determination of IC₅₀ values for ASOs targeting ACE2 (FIG. 18A) and FURIN (FIG. 18B). Concentration: Top=1.5 μM; Time point: 5 days.

[0171] FIG. 19A-19F show that the presence of a two-thymidine linker between the conjugate and the siRNA does not impact siRNA tissue distribution profile. The siRNA structural configurations studied to evaluate the impact of the nature of the linker on distribution is shown in FIG. 19A, FIG. 19C, and FIG. 19E. The corresponding bar graphs for siRNA accumulation in the various tissues are shown in FIG. 19B, FIG. 19D, and FIG. 19F, respectively. Shown are siRNA strand accumulation of DCA-conjugated siRNA in liver, kidney, spleen, lung, heart, muscle and fat 1-week after a single SC injection with 20 mg/kg (n=5-6 mice per group ±SD), measured by PNA hybridization assay.

[0172] FIG. 20A-20B show that the presence of a two-thymidine linker increases DCA-conjugated siRNA silencing in multiple tissues. FIG. 20A, effect on huntingtin mRNA expression. FIG. 20B, effect on cyclophilin B mRNA expression. The presence of a two-thymidine linker increases DCA-conjugated siRNA silencing in multiple tissues. SC injection (FVB/N mice); 20 mg/kg; collection of tissues one week after injection; n=6 per group. Huntingtin (Htt) (A.) or Cyclophilin B (Ppib) (B.) mRNA levels were measured using QuantiGene® (Affymetrix), normalized to a housekeeping gene, Hprt (Hypoxanthine-guanine phosphoribosyl transferase), and presented as percent of PBS (Phosphate buffered saline) control (mean±SD). Data analysis: t test (****P<0.0001, ***P<0.001, **P<0.01, *P<0.1).

[0173] FIG. 21 depicts designs and structural configurations of siRNAs for lung delivery via systemic (SC). Schematic of siRNA structural configuration studied to evaluate the impact of the chemical composition on siRNA distribution and efficacy.

[0174] FIG. 22 depicts distribution and accumulation of siRNAs conjugated to DCA and containing different numbers of 3′ exNA modifications and phosphorothioates. These data show increased accumulation of DCA-conjugated siRNAs with exNA modifications compared to those without exNAs in all tissues including the lungs. SC, 20 mg/kg, n=3, 1 week, PNA hybridization assay. p2 scaffold: 4PS-exNa≈7PS in liver, spleen, lung; 4PS-exNa>7 PS in heart, muscle, fat; 7PS>4PS-exNa in kidney. p5 scaffold: 4PS-exNa>2PO-exNa 2PS-exNa≥4 PS>2PS.

[0175] FIG. 23A-23H depict target mRNA silencing (Htt) after systemic administration of siRNAs conjugated to DCA and containing different numbers of 3′ exNA modifications and phosphorothioates in various organ tissues. FIG. 23A, liver; FIG. 23B, kidney; FIG. 23C, spleen; FIG. 23D, muscle; FIG. 23E, lung; FIG. 23F, heart; FIG. 23G, adrenal glands; FIG. 23H, Fat. These data show increased silencing of DCA-conjugated siRNAs with exNA modifications compared to those without exNAs in all tissues including the lungs. SC, 20 mg/kg, n=5, 1 week, bDNA QuantiGene assay.

[0176] FIG. 24 depicts designs of siRNAs for lung delivery via intratracheal administration. Schematic of siRNA structural configuration studied to evaluate the impact of the chemical composition on siRNA distribution and efficacy.

[0177] FIG. 25A-25B depict siRNA accumulation after intratracheal administration. FIG. 25A, Distribution and delivery throughout the lung of mono and divalent siRNAs (Cy-3) compared to PBS controls; FIG. 25B, distribution and delivery throughout the lung of EPA and DCA conjugated siRNAs (Cy-3) compared to PBS controls. Intratracheal; 20 nmol for mono, 40 nmol for di; n=2, 24 h, 5×, Scale=1 mm. Subcutaneous; 40 nmol; n=3, 48 h, 5×, Scale=1 mm.

[0178] FIG. 26A-26C depict mono and di-valent siRNA accumulation after intratracheal administration. FIG. 26A, distribution and delivery throughout the lung of mono and divalent siRNAs (Cy-3) compared to PBS controls; FIG. 26B, distribution and delivery throughout the lung of mono and divalent siRNAs (Red, Cy3) to club cells (epithelial) (green) of the lungs compared to PBS controls; FIG. 26C, distribution and delivery throughout the lung of mono and divalent siRNAs (Red, Cy3) to alveoli type II cells (green) in the lung compared to PBS controls. Divalent siRNAs distribute to all cells of the lungs and saturate both alveolar and epithelial (club) cells 24 hours after intratracheal administration.

[0179] FIG. 27A-27C depict EPA and DCA conjugated siRNA distribution throughout the lungs after subcutaneous (SC) administration). FIG. 27A, distribution and delivery throughout the lung of EPA and DCA conjugated siRNAs (Cy-3) compared to PBS controls; FIG. 27B, distribution of EPA and DCA conjugated siRNAs (Red, Cy3) to club cells (epithelial) (green) of the lungs compared to PBS controls; FIG. 27C, distribution of EPA and DCA conjugated siRNAs (Red, Cy3) to alveoli cells (green) in the lung compared to PBS controls.

[0180] FIG. 28A-28D depict quantification of siRNA accumulation after systemic and intratracheal administration. FIG. 28A, fluorescence uptake in alveolar cells; FIG. 28B, percent in alveoli cells/total cells; FIG. 28C, fluorescence uptake in club cells; FIG. 28D, percent in club cells/total cells.

[0181] FIG. 29A-29G depict quantification of EPA and DCA conjugated siRNA accumulation after systemic administration. FIG. 29A, distribution in various lung cells; FIG. 29B, distribution by cell type; FIG. 29C-29G, CY3 signals in total cells, immune cells, endothelial cells, epithelial cells and fibroblasts, respectively. Using flow cytometry siRNA accumulation was quantified after systemic (SC) administration of EPA and DCA conjugated siRNAs.

[0182] FIG. 30A-30G depict quantification of siRNA accumulation after intratracheal administration. Using flow cytometry, siRNA accumulation was quantified after intratracheal administration of mono and di-valent siRNAs. FIG. 30A, distribution in various lung cells;

[0183] FIG. 30B, distribution by cell type; FIG. 30C-30G, CY3 signals in total cells, immune cells, endothelial cells, epithelial cells and fibroblasts, respectively. Divalent siRNAs showed the highest amount of uptake in all cell types compared to other siRNAs.

[0184] FIG. 31A-31B depict distribution and accumulation of mono and di-siRNAs. FIG. 31A, di-siRNAs after intratracheal administration; FIG. 31B, di-siRNAs after intratracheal administration and DAC/EPA siRNA after SC injection. Intratracheal or SC, 7.5 and 15 nmol and 40 nmol, n=3, 1 week, PNA hybridization assay.

[0185] FIG. 32A-32H show target mRNA silencing (Htt) after intratracheal administration of mono and di-siRNAs in various tissues. FIG. 32A, liver; FIG. 32B, kidney;

[0186] FIG. 32C, spleen; FIG. 32D, lung; FIG. 32E, heart, FIG. 32F, adrenal glands; FIG. 32G, muscle; FIG. 32H, fat. Low dose of di-siRNA achieved the best silencing in lungs without silence the gene in other tissues. Intratracheal, 7.5 or 15 nmol, n=5, 1 week, bDNA QuantiGene assay.

[0187] FIG. 33 depicts target mRNA silencing (Htt) after intratracheal administration of mono and di-siRNAs. Intratracheal, 7.5 or 15 nmol, n=5, 1 week, bDNA QuantiGene assay.

[0188] FIG. 34 depicts a screen of siRNAs and ASOs targeting various SARS-CoV2 genes and tested for silencing efficacy. siRNAs and ASOs were tested in in A549-ACE2 cells and silencing was assessed using the psi-check reporter system. siRNA concentration: 10 nM; ASO concentration: 25 nM; Time point: 72 hours.

[0189] FIG. 35 depicts dose response data of select siRNAs targeting various SARS-CoV2 genes. The data reports relative mRNA abundance of the targeted SARS-CoV2 genes and the percent of cells that are positive for the SARS-CoV2 spike protein. siRNAs were tested in in A549-ACE2 cells and silencing was assessed using the psi-check reporter system.

[0190] FIG. 36 depicts dose response data of select siRNAs targeting various SARS-CoV2 genes. The A549-ACE2 cells were infected with SARS-CoV-2 at a MOI of 0.1 and 0.4. The data reports relative mRNA abundance of the targeted SARS-CoV2 genes.

[0191] FIG. 37 depicts a screen of siRNAs targeting the orf7a SARS-CoV2 gene. siRNAs were tested in in A549-ACE2 cells and the data reports relative mRNA abundance of the targeted orf7a SARS-CoV2 gene and the percent of cells that are positive for the SARS-CoV2 spike protein. siRNA concentration: 10 nM; Time point: 72 hours.

### DETAILED DESCRIPTION

[0192] Novel SARS-CoV-2 target sequences are provided. Also provided are novel RNA molecules, such as siRNAs and branched RNA compounds containing the same, that target one or more SARS-CoV-2 genes mRNA, such as one or more target sequences of the disclosure. Also provided are novel ACE2, FURIN, IL-6, and TMPRSS2 target sequences.

[0193] Unless otherwise specified, nomenclature used in connection with cell and tissue culture, molecular biology, immunology, microbiology, genetics and protein and nucleic acid chemistry and hybridization described herein are those well-known and commonly used in the art. Unless otherwise specified, the methods and techniques provided herein are performed according to conventional methods well known in the art and as described in various general and more specific references that are cited and discussed throughout the present specification unless otherwise indicated. Enzymatic reactions and purification techniques are performed according to manufacturer's specifications, as commonly accomplished in the art or as described herein. The nomenclature used in connection with, and the laboratory procedures and techniques of, analytical chemistry, synthetic organic chemistry, and medicinal and pharmaceutical chemistry described herein are those well-known and commonly used in the art. Standard techniques are used for chemical syntheses, chemical analyses, pharmaceutical preparation, formulation, delivery, and treatment of patients.

[0194] Unless otherwise defined herein, scientific and technical terms used herein have the meanings that are commonly understood by those of ordinary skill in the art. In the event of any latent ambiguity, definitions provided herein take precedent over any dictionary or extrinsic definition. Unless otherwise required by context, singular terms shall include pluralities and plural terms shall include the singular. The use of “or” means “and/or” unless stated otherwise. The use of the term “including,” as well as other forms, such as “includes” and “included,” is not limiting.

[0195] So that the invention may be more readily understood, certain terms are first defined.

[0196] The term “nucleoside” refers to a molecule having a purine or pyrimidine base covalently linked to a ribose or deoxyribose sugar. Exemplary nucleosides include adenosine, guanosine, cytidine, uridine and thymidine. Additional exemplary nucleosides include inosine, 1-methyl inosine, pseudouridine, 5,6-dihydrouridine, ribothymidine, 2N-methylguanosine and N2,N2-dimethylguanosine (also referred to as “rare” nucleosides). The term “nucleotide” refers to a nucleoside having one or more phosphate groups joined in ester linkages to the sugar moiety. Exemplary nucleotides include nucleoside monophosphates, diphosphates and triphosphates. The terms “polynucleotide” and “nucleic acid molecule” are used interchangeably herein and refer to a polymer of nucleotides joined together by a phosphodiester or phosphorothioate linkage between 5′ and 3′ carbon atoms.

[0197] The term “RNA” or “RNA molecule” or “ribonucleic acid molecule” refers to a polymer of ribonucleotides (e.g., 2, 3, 4, 5, 10, 15, 20, 25, 30, or more ribonucleotides). The term “DNA” or “DNA molecule” or “deoxyribonucleic acid molecule” refers to a polymer of deoxyribonucleotides. DNA and RNA can be synthesized naturally (e.g., by DNA replication or transcription of DNA, respectively). RNA can be post-transcriptionally modified. DNA and RNA can also be chemically synthesized. DNA and RNA can be single-stranded (i.e., ssRNA and ssDNA, respectively) or multi-stranded (e.g., double stranded, i.e., dsRNA and dsDNA, respectively). “mRNA” or “messenger RNA” is single-stranded RNA that specifies the amino acid sequence of one or more polypeptide chains. This information is translated during protein synthesis when ribosomes bind to the mRNA.

[0198] As used herein, the term “small interfering RNA” (“siRNA”) (also referred to in the art as “short interfering RNAs”) refers to an RNA (or RNA analog) comprising between about 10-50 nucleotides (or nucleotide analogs), which is capable of directing or mediating RNA interference. In certain embodiments, a siRNA comprises between about 15-30 nucleotides or nucleotide analogs, or between about 16-25 nucleotides (or nucleotide analogs), or between about 18-23 nucleotides (or nucleotide analogs), or between about 19-22 nucleotides (or nucleotide analogs) (e.g., 19, 20, 21 or 22 nucleotides or nucleotide analogs). The term “short” siRNA refers to a siRNA comprising about 21 nucleotides (or nucleotide analogs), for example, 19, 20, 21 or 22 nucleotides. The term “long” siRNA refers to a siRNA comprising about 24-25 nucleotides, for example, 23, 24, 25 or 26 nucleotides. Short siRNAs may, in some instances, include fewer than 19 nucleotides, e.g., 16, 17 or 18 nucleotides, provided that the shorter siRNA retains the ability to mediate RNAi. Likewise, long siRNAs may, in some instances, include more than 26 nucleotides, provided that the longer siRNA retains the ability to mediate RNAi absent further processing, e.g., enzymatic processing, to a short siRNA.

[0199] The term “nucleotide analog” or “altered nucleotide” or “modified nucleotide” refers to a non-standard nucleotide, including non-naturally occurring ribonucleotides or deoxyribonucleotides. Exemplary nucleotide analogs are modified at any position so as to alter certain chemical properties of the nucleotide yet retain the ability of the nucleotide analog to perform its intended function. Examples of positions of the nucleotide, which may be derivatized include: the 5 position, e.g., 5-(2-amino)propyl uridine, 5-bromo uridine, 5-propyne uridine, 5-propenyl uridine, etc.; the 6 position, e.g., 6-(2-amino)propyl uridine; and the 8-position for adenosine and/or guanosines, e.g., 8-bromo guanosine, 8-chloro guanosine, 8-fluoroguanosine, etc. Nucleotide analogs also include deaza nucleotides, e.g., 7-deaza-adenosine; O- and N-modified (e.g., alkylated, e.g., N6-methyl adenosine, or as otherwise known in the art) nucleotides; and other heterocyclically modified nucleotide analogs, such as those described in Herdewijn, Antisense Nucleic Acid Drug Dev., 2000 Aug. 10(4):297-310.

[0200] Nucleotide analogs may also comprise modifications to the sugar portion of the nucleotides. For example, the 2′ OH-group may be replaced by a group selected from H, OR, R, F, Cl, Br, I, SH, SR, NH₂, NHR, NR₂, or COOR, wherein R is substituted or unsubstituted C₁-C₆ alkyl, alkenyl, alkynyl, aryl, etc. Other possible modifications include those described in U.S. Pat. Nos. 5,858,988, and 6,291,438.

[0201] The phosphate group of the nucleotide may also be modified, e.g., by substituting one or more of the oxygens of the phosphate group with sulfur (e.g., phosphorothioates), or by making other substitutions, which allow the nucleotide to perform its intended function, such as described in, for example, Eckstein, Antisense Nucleic Acid Drug Dev. 2000 Apr. 10(2):117-21, Rusckowski et al. Antisense Nucleic Acid Drug Dev. 2000 Oct. 10(5):333-45, Stein, Antisense Nucleic Acid Drug Dev. 2001 Oct. 11(5): 317-25, Vorobjev et al. Antisense Nucleic Acid Drug Dev. 2001 Apr. 11(2):77-85, and U.S. Pat. No. 5,684,143. Certain of the above-referenced modifications (e.g., phosphate group modifications) decrease the rate of hydrolysis of, for example, polynucleotides comprising said analogs in vivo or in vitro.

[0202] The term “oligonucleotide” refers to a short polymer of nucleotides and/or nucleotide analogs.

[0203] The term “RNA analog” refers to a polynucleotide (e.g., a chemically synthesized polynucleotide) having at least one altered or modified nucleotide as compared to a corresponding unaltered or unmodified RNA, but retaining the same or similar nature or function as the corresponding unaltered or unmodified RNA. As discussed above, the oligonucleotides may be linked with linkages, which result in a lower rate of hydrolysis of the RNA analog as compared to an RNA molecule with phosphodiester linkages. For example, the nucleotides of the analog may comprise methylenediol, ethylene diol, oxymethylthio, oxyethylthio, oxycarbonyloxy, phosphorodiamidate, phosphoroamidate, and/or phosphorothioate linkages. Some RNA analogues include sugar- and/or backbone-modified ribonucleotides and/or deoxyribonucleotides. Such alterations or modifications can further include addition of non-nucleotide material, such as to the end(s) of the RNA or internally (at one or more nucleotides of the RNA). An RNA analog need only be sufficiently similar to natural RNA that it has the ability to mediate RNA interference.

[0204] As used herein, the term “RNA interference” (“RNAi”) refers to a selective intracellular degradation of RNA. RNAi occurs in cells naturally to remove foreign RNAs (e.g., viral RNAs). Natural RNAi proceeds via fragments cleaved from free dsRNA, which direct the degradative mechanism to other similar RNA sequences. Alternatively, RNAi can be initiated by the hand of man, for example, to silence the expression of target genes.

[0205] An RNAi agent, e.g., an RNA silencing agent, having a strand, which is “sequence sufficiently complementary to a target mRNA sequence to direct target-specific RNA interference (RNAi)” means that the strand has a sequence sufficient to trigger the destruction of the target mRNA by the RNAi machinery or process.

[0206] As used herein, the term “isolated RNA” (e.g., “isolated siRNA” or “isolated siRNA precursor”) refers to RNA molecules, which are substantially free of other cellular material, or culture medium when produced by recombinant techniques, or substantially free of chemical precursors or other chemicals when chemically synthesized.

[0207] As used herein, the term “RNA silencing” refers to a group of sequence-specific regulatory mechanisms (e.g. RNA interference (RNAi), transcriptional gene silencing (TGS), post-transcriptional gene silencing (PTGS), quelling, co-suppression, and translational repression) mediated by RNA molecules, which result in the inhibition or “silencing” of the expression of a corresponding protein-coding gene. RNA silencing has been observed in many types of organisms, including plants, animals, and fungi.

[0208] The term “discriminatory RNA silencing” refers to the ability of an RNA molecule to substantially inhibit the expression of a “first” or “target” polynucleotide sequence while not substantially inhibiting the expression of a “second” or “non-target” polynucleotide sequence,” e.g., when both polynucleotide sequences are present in the same cell. In certain embodiments, the target polynucleotide sequence corresponds to a target gene, while the non-target polynucleotide sequence corresponds to a non-target gene. In other embodiments, the target polynucleotide sequence corresponds to a target allele, while the non-target polynucleotide sequence corresponds to a non-target allele. In certain embodiments, the target polynucleotide sequence is the DNA sequence encoding the regulatory region (e.g. promoter or enhancer elements) of a target gene. In other embodiments, the target polynucleotide sequence is a target mRNA encoded by a target gene.

[0209] The term “in vitro” has its art recognized meaning, e.g., involving purified reagents or extracts, e.g., cell extracts. The term “in vivo” also has its art recognized meaning, e.g., involving living cells, e.g., immortalized cells, primary cells, cell lines, and/or cells in an organism.

[0210] As used herein, the term “transgene” refers to any nucleic acid molecule, which is inserted by artifice into a cell, and becomes part of the genome of the organism that develops from the cell. Such a transgene may include a gene that is partly or entirely heterologous (i.e., foreign) to the transgenic organism, or may represent a gene homologous to an endogenous gene of the organism. The term “transgene” also means a nucleic acid molecule that includes one or more selected nucleic acid sequences, e.g., DNAs, that encode one or more engineered RNA precursors, to be expressed in a transgenic organism, e.g., animal, which is partly or entirely heterologous, i.e., foreign, to the transgenic animal, or homologous to an endogenous gene of the transgenic animal, but which is designed to be inserted into the animal's genome at a location which differs from that of the natural gene. A transgene includes one or more promoters and any other DNA, such as introns, necessary for expression of the selected nucleic acid sequence, all operably linked to the selected sequence, and may include an enhancer sequence.

[0211] A gene “involved” in a disease or disorder includes a gene, the normal or aberrant expression or function of which effects or causes the disease or disorder or at least one symptom of said disease or disorder.

[0212] The term “gain-of-function mutation” as used herein, refers to any mutation in a gene in which the protein encoded by said gene (i.e., the mutant protein) acquires a function not normally associated with the protein (i.e., the wild type protein) and causes or contributes to a disease or disorder. The gain-of-function mutation can be a deletion, addition, or substitution of a nucleotide or nucleotides in the gene, which gives rise to the change in the function of the encoded protein. In one embodiment, the gain-of-function mutation changes the function of the mutant protein or causes interactions with other proteins. In another embodiment, the gain-of-function mutation causes a decrease in or removal of normal wild-type protein, for example, by interaction of the altered, mutant protein with said normal, wild-type protein.

[0213] As used herein, the term “target gene” is a gene whose expression is to be substantially inhibited or “silenced.” This silencing can be achieved by RNA silencing, e.g., by cleaving the mRNA of the target gene or translational repression of the target gene. The term “non-target gene” is a gene whose expression is not to be substantially silenced. In one embodiment, the polynucleotide sequences of the target and non-target gene (e.g. mRNA encoded by the target and non-target genes) can differ by one or more nucleotides. In another embodiment, the target and non-target genes can differ by one or more polymorphisms (e.g., Single Nucleotide Polymorphisms or SNPs). In another embodiment, the target and non-target genes can share less than 100% sequence identity. In another embodiment, the non-target gene may be a homologue (e.g. an orthologue or paralogue) of the target gene.

[0214] As described herein, the term “SARS-CoV-2” refers to the severe acute respiratory syndrome coronavirus 2, which can cause severe respiratory illness. The SARS-CoV-2 genome contains nine genes. Four genes encode for four structural proteins, S (spike), E (envelope), M (matrix) and N (nucleocapsid). The five other genes are orfla, orflab, 3a, 8b, and 7a. The sequence of the SARS-CoV-2 and the nine genes are recited in Table 1 and Table 2, respectively.

[0215] The phrase “examining the function of a gene in a cell or organism” refers to examining or studying the expression, activity, function or phenotype arising therefrom.

[0216] As used herein, the term “RNA silencing agent” refers to an RNA, which is capable of inhibiting or “silencing” the expression of a target gene. In certain embodiments, the RNA silencing agent is capable of preventing complete processing (e.g., the full translation and/or expression) of a mRNA molecule through a post-transcriptional silencing mechanism. RNA silencing agents include small (<50 b.p.), noncoding RNA molecules, for example RNA duplexes comprising paired strands, as well as precursor RNAs from which such small noncoding RNAs can be generated. Exemplary RNA silencing agents include siRNAs, miRNAs, siRNA-like duplexes, antisense oligonucleotides, GAPMER molecules, and dual-function oligonucleotides, as well as precursors thereof. In one embodiment, the RNA silencing agent is capable of inducing RNA interference. In another embodiment, the RNA silencing agent is capable of mediating translational repression.

[0217] As used herein, the term “rare nucleotide” refers to a naturally occurring nucleotide that occurs infrequently, including naturally occurring deoxyribonucleotides or ribonucleotides that occur infrequently, e.g., a naturally occurring ribonucleotide that is not guanosine, adenosine, cytosine, or uridine. Examples of rare nucleotides include, but are not limited to, inosine, 1-methyl inosine, pseudouridine, 5,6-dihydrouridine, ribothymidine, 2N-methylguanosine and 2,2N,N-dimethylguanosine.

[0218] The term “engineered,” as in an engineered RNA precursor, or an engineered nucleic acid molecule, indicates that the precursor or molecule is not found in nature, in that all or a portion of the nucleic acid sequence of the precursor or molecule is created or selected by a human. Once created or selected, the sequence can be replicated, translated, transcribed, or otherwise processed by mechanisms within a cell. Thus, an RNA precursor produced within a cell from a transgene that includes an engineered nucleic acid molecule is an engineered RNA precursor.

[0219] As used herein, the term “microRNA” (“miRNA”), also known in the art as “small temporal RNAs” (“stRNAs”), refers to a small (10-50 nucleotide) RNA, which are genetically encoded (e.g., by viral, mammalian, or plant genomes) and are capable of directing or mediating RNA silencing. An “miRNA disorder” shall refer to a disease or disorder characterized by an aberrant expression or activity of a miRNA.

[0220] As used herein, the term “dual functional oligonucleotide” refers to a RNA silencing agent having the formula T-L-μ, wherein T is an mRNA targeting moiety, L is a linking moiety, and p is a miRNA recruiting moiety. As used herein, the terms “mRNA targeting moiety,” “targeting moiety,” “mRNA targeting portion” or “targeting portion” refer to a domain, portion or region of the dual functional oligonucleotide having sufficient size and sufficient complementarity to a portion or region of an mRNA chosen or targeted for silencing (i.e., the moiety has a sequence sufficient to capture the target mRNA).

[0221] As used herein, the term “linking moiety” or “linking portion” refers to a domain, portion or region of the RNA-silencing agent which covalently joins or links the mRNA.

[0222] As used herein, the term “antisense strand” of an RNA silencing agent, e.g., an siRNA or RNA silencing agent, refers to a strand that is substantially complementary to a section of about 10-50 nucleotides, e.g., about 15-30, 16-25, 18-23 or 19-22 nucleotides of the mRNA of the gene targeted for silencing. The antisense strand or first strand has sequence sufficiently complementary to the desired target mRNA sequence to direct target-specific silencing, e.g., complementarity sufficient to trigger the destruction of the desired target mRNA by the RNAi machinery or process (RNAi interference) or complementarity sufficient to trigger translational repression of the desired target mRNA.

[0223] The term “sense strand” or “second strand” of an RNA silencing agent, e.g., an siRNA or RNA silencing agent, refers to a strand that is complementary to the antisense strand or first strand. Antisense and sense strands can also be referred to as first or second strands, the first or second strand having complementarity to the target sequence and the respective second or first strand having complementarity to said first or second strand. miRNA duplex intermediates or siRNA-like duplexes include a miRNA strand having sufficient complementarity to a section of about 10-50 nucleotides of the mRNA of the gene targeted for silencing and a miRNA* strand having sufficient complementarity to form a duplex with the miRNA strand.

[0224] As used herein, the term “guide strand” refers to a strand of an RNA silencing agent, e.g., an antisense strand of an siRNA duplex or siRNA sequence, that enters into the RISC complex and directs cleavage of the target mRNA.

[0225] As used herein, the term “asymmetry,” as in the asymmetry of the duplex region of an RNA silencing agent (e.g., the stem of an shRNA), refers to an inequality of bond strength or base pairing strength between the termini of the RNA silencing agent (e.g., between terminal nucleotides on a first strand or stem portion and terminal nucleotides on an opposing second strand or stem portion), such that the 5′ end of one strand of the duplex is more frequently in a transient unpaired, e.g., single-stranded, state than the 5′ end of the complementary strand. This structural difference determines that one strand of the duplex is preferentially incorporated into a RISC complex. The strand whose 5′ end is less tightly paired to the complementary strand will preferentially be incorporated into RISC and mediate RNAi.

[0226] As used herein, the term “bond strength” or “base pair strength” refers to the strength of the interaction between pairs of nucleotides (or nucleotide analogs) on opposing strands of an oligonucleotide duplex (e.g., an siRNA duplex), due primarily to H-bonding, van der Waals interactions, and the like, between said nucleotides (or nucleotide analogs).

[0227] As used herein, the “5′ end,” as in the 5′ end of an antisense strand, refers to the 5′ terminal nucleotides, e.g., between one and about 5 nucleotides at the 5′ terminus of the antisense strand. As used herein, the “3′ end,” as in the 3′ end of a sense strand, refers to the region, e.g., a region of between one and about 5 nucleotides, that is complementary to the nucleotides of the 5′ end of the complementary antisense strand.

[0228] As used herein the term “destabilizing nucleotide” refers to a first nucleotide or nucleotide analog capable of forming a base pair with second nucleotide or nucleotide analog such that the base pair is of lower bond strength than a conventional base pair (i.e., Watson-Crick base pair). In certain embodiments, the destabilizing nucleotide is capable of forming a mismatch base pair with the second nucleotide. In other embodiments, the destabilizing nucleotide is capable of forming a wobble base pair with the second nucleotide. In yet other embodiments, the destabilizing nucleotide is capable of forming an ambiguous base pair with the second nucleotide.

[0229] As used herein, the term “base pair” refers to the interaction between pairs of nucleotides (or nucleotide analogs) on opposing strands of an oligonucleotide duplex (e.g., a duplex formed by a strand of a RNA silencing agent and a target mRNA sequence), due primarily to H-bonding, van der Waals interactions, and the like between said nucleotides (or nucleotide analogs). As used herein, the term “bond strength” or “base pair strength” refers to the strength of the base pair.

[0230] As used herein, the term “mismatched base pair” refers to a base pair consisting of non-complementary or non-Watson-Crick base pairs, for example, not normal complementary G:C, A:T or A:U base pairs. As used herein the term “ambiguous base pair” (also known as a non-discriminatory base pair) refers to a base pair formed by a universal nucleotide.

[0231] As used herein, term “universal nucleotide” (also known as a “neutral nucleotide”) include those nucleotides (e.g. certain destabilizing nucleotides) having a base (a “universal base” or “neutral base”) that does not significantly discriminate between bases on a complementary polynucleotide when forming a base pair. Universal nucleotides are predominantly hydrophobic molecules that can pack efficiently into antiparallel duplex nucleic acids (e.g., double-stranded DNA or RNA) due to stacking interactions. The base portion of universal nucleotides typically comprise a nitrogen-containing aromatic heterocyclic moiety.

[0232] As used herein, the terms “sufficient complementarity” or “sufficient degree of complementarity” mean that the RNA silencing agent has a sequence (e.g. in the antisense strand, mRNA targeting moiety or miRNA recruiting moiety), which is sufficient to bind the desired target RNA, respectively, and to trigger the RNA silencing of the target mRNA.

[0233] As used herein, the term “translational repression” refers to a selective inhibition of mRNA translation. Natural translational repression proceeds via miRNAs cleaved from shRNA precursors. Both RNAi and translational repression are mediated by RISC. Both RNAi and translational repression occur naturally or can be initiated by the hand of man, for example, to silence the expression of target genes.

[0234] Various methodologies of the instant invention include a step that involves comparing a value, level, feature, characteristic, property, etc. to a “suitable control,” referred to interchangeably herein as an “appropriate control.” A “suitable control” or “appropriate control” is any control or standard familiar to one of ordinary skill in the art useful for comparison purposes. In one embodiment, a “suitable control” or “appropriate control” is a value, level, feature, characteristic, property, etc. determined prior to performing an RNAi methodology, as described herein. For example, a transcription rate, mRNA level, translation rate, protein level, biological activity, cellular characteristic or property, genotype, phenotype, etc. can be determined prior to introducing an RNA silencing agent of the invention into a cell or organism. In another embodiment, a “suitable control” or “appropriate control” is a value, level, feature, characteristic, property, etc. determined in a cell or organism, e.g., a control or normal cell or organism, exhibiting, for example, normal traits. In yet another embodiment, a “suitable control” or “appropriate control” is a predefined value, level, feature, characteristic, property, etc.

[0235] As used herein, the terms “extended nucleic acid” or “exNA” or ex-NA” refer to a novel oligonucleotide backbone modification. This chemical modification of the backbone significantly enhances oligonucleotide metabolic stability. The chemical modification includes one or more carbon atoms or chains inserted in the backbone at the 5′-position, 3′-position, or both. This structural modulation forms non-canonical stretched/flexible structure on oligo-backbones, which protect oligonucleotides from cleavage by various nucleases.

[0236] The novel exNA-modification is widely compatible in any oligonucleotide, such as an siRNA, antisense oligonucleotide, and mRNA. The combination of an exNA-phosphorothioate (exNA-PS) backbone enables drastic enhancement of metabolic stability (10-50 orders of magnitude as compared to unmodified oligonucleotides) without compromising the function of the oligonucleotide (e.g., siRNA-mediated silencing efficacy). For example, 5′-[exNA-PS]4-3′ modification induce NO negative impact on siRNA efficacy while inducing drastically high exonuclease stability, as will be shown below. Moreover, an exNA-phosphodiester (exNA-PO) backbone also enables drastic enhancement of metabolic stability without compromising the function of the oligonucleotide. It has been previously shown that phosphorothioate-containing backbones in oligonucleotides are toxic when administered in vivo. Accordingly, the exNA-PO backbone can be employed to enhancement of metabolic stability while decreasing toxicity. Thus, this metabolically stabilizing exNA modification is widely and robustly improves the performance of therapeutic oligonucleotide candidates in vivo.

[0237] Unless otherwise defined, all technical and scientific terms used herein have the same meaning as commonly understood by one of ordinary skill in the art to which this invention belongs. Although methods and materials similar or equivalent to those described herein can be used in the practice or testing of the present invention, suitable methods and materials are described below. All publications, patent applications, patents, and other references mentioned herein are incorporated by reference in their entirety. In case of conflict, the present specification, including definitions, will control. In addition, the materials, methods, and example are illustrative only and not intended to be limiting.

[0238] Various aspects of the invention are described in further detail in the following subsections.

[0239] I. Novel Target Sequences

[0240] In certain exemplary embodiments, RNA silencing agents of the invention are capable of targeting a SARS-CoV-2 nucleic acid sequence of any one of SEQ ID NOs: 1-10, as recited in Table 4 and Table 5.

[0241] In certain exemplary embodiments, RNA silencing agents of the invention are capable of targeting one or more of a SARS-CoV-2 nucleic acid sequence of any one of the 45-nucleotide target gene regions recited in Table 6A. In certain exemplary embodiments, RNA silencing agents of the invention are capable of targeting one or more of a SARS-CoV-2 nucleic acid sequence of any one of the 20-nucleotide target regions recited in Table 6A.

[0242] In certain exemplary embodiments, RNA silencing agents of the invention are capable of targeting one or more of a SARS-CoV-2 nucleic acid sequence of any one of the 45-nucleotide target gene regions recited in Table 7. In certain exemplary embodiments, RNA silencing agents of the invention are capable of targeting one or more of a SARS-CoV-2 nucleic acid sequence of any one of the 20-nucleotide target regions recited in Table 7.

[0243] In certain exemplary embodiments, RNA silencing agents of the invention are capable of targeting one or more of a SARS-CoV-2 nucleic acid sequence of any one of the 45-nucleotide target gene regions recited in Table 8. In certain exemplary embodiments, RNA silencing agents of the invention are capable of targeting one or more of a SARS-CoV-2 nucleic acid sequence of any one of the 20-nucleotide target regions recited in Table 8.

[0244] In certain exemplary embodiments, RNA silencing agents of the invention comprise an antisense strand as recited in Table 6B. In certain exemplary embodiments, RNA silencing agents of the invention comprise a sense strand as recited in Table 6C. In certain exemplary embodiments, RNA silencing agents of the invention comprise a sense strand as recited in Table 6D.

[0245] In one embodiment, the RNA silencing agents of the invention capable of targeting one or more of a SARS-CoV-2 nucleic acid sequence can be combined with RNA silencing agents of the invention capable of targeting one or more of an ACE2, FURIN, TMPRSS2, IL-6, and IL-6R nucleic acid sequence. The endogenous genes ACE2, FURIN, TMPRSS2, IL-6, and IL-6R each may play a role in SARS-CoV-2 infection and pathogenesis.

[0246] “ACE2”, as described herein, refers to angiotensin I converting enzyme 2. ACE2 belongs to a family of dipeptidyl carboxydipeptidases and is a zinc-containing metallo protease. ACE2 cleaves angiotensin I into angiotensin II, which has vasoconstrictive properties. It also is a functional receptor of the spike glycoprotein of the human corona viruses. ACE2 expression is age and disease state dependent. Children have lower ACE2 expression, which may explain their decreased susceptibility and milder disease symptoms upon SARS-CoV-2 infection. As such, a reduction in ACE2 expression is a viable therapeutic approach.

[0247] “FURIN”, as described herein, refers to a subtilisin-like proprotein belonging to the convertase family of proteases. They include proteases that process protein and peptides precursors as they traffic through the constitute branches of the secretory pathway. Furin is exploited by viruses for cleaving envelope proteins. The spike protein of the SARS-CoV-2 virus must be cleaved by furin to become functional, and as such furin represents an attractive target for siRNA (Coutard et al. Antiviral Research. 176: 104727. April 2020).

[0248] “TMPRSS2”, as described herein, refers to Transmembrane Serine Protease 2. TMPRSS2 has been shown to contribute to virus spread and immunopathology in the airways of murine models after coronavirus infection (Iwata-Yoshikawa et al. J. Virol. 93 (6): e01815-18. March 2019).

[0249] “IL-6”, as described herein, refers to interleukin-6. “IL-6R”, as described herein, refers to interleukin-6 receptor. IL-6 is an inflammatory agent that contributes to cytokine release syndrome (CRS), a severe and potentially deadly response to an infection. IL-6 stimulates inflammation through an interaction with IL-6R (Liu et al. J Autoimmun. 10: 102452. April 2020). Inhibition of IL-6 or its receptor, IL-6R may prevent or reduce the cytokine release syndrome that occurs during a SARS-CoV-2 infection.

[0250] In certain exemplary embodiments, RNA silencing agents of the invention are capable of targeting an ACE2 nucleic acid sequence of any one of the 45-nucleotide target gene regions recited in Table 11D and Table 12C. In certain exemplary embodiments, RNA silencing agents of the invention are capable of targeting an ACE2 nucleic acid sequence of any one of the 20-nucleotide target regions recited in Table 1 ID and Table 12C.

[0251] In certain exemplary embodiments, RNA silencing agents of the invention are capable of targeting an FURIN nucleic acid sequence of any one of the 45-nucleotide target gene regions recited in Table 11C and Table 12D. In certain exemplary embodiments, RNA silencing agents of the invention are capable of targeting an FURIN nucleic acid sequence of any one of the 20-nucleotide target regions recited in Table 1 IC and Table 12D.

[0252] In certain exemplary embodiments, RNA silencing agents of the invention are capable of targeting an TMPRSS2 nucleic acid sequence of any one of the 45-nucleotide target gene regions recited in Table 11A and Table 12A. In certain exemplary embodiments, RNA silencing agents of the invention are capable of targeting an TMPRSS2 nucleic acid sequence of any one of the 20-nucleotide target regions recited in Table 11A and Table 12A.

[0253] In certain exemplary embodiments, RNA silencing agents of the invention are capable of targeting an IL-6 nucleic acid sequence of any one of the 45-nucleotide target gene regions recited in Table 11B and Table 12B. In certain exemplary embodiments, RNA silencing agents of the invention are capable of targeting an IL-6 nucleic acid sequence of any one of the 20-nucleotide target regions recited in Table 11B and Table 12B.

[0254] In certain exemplary embodiments, RNA silencing agents of the invention are capable of targeting an IL-6R nucleic acid sequence of any one of the 45-nucleotide target gene regions recited in Table 12E. In certain exemplary embodiments, RNA silencing agents of the invention are capable of targeting an IL-6R nucleic acid sequence of any one of the 20-nucleotide target regions recited in Table 12E.

[0255] Genomic sequence for each target sequence can be found in, for example, the publicly available database maintained by the NCBI.

[0256] II. siRNA Design

[0257] In some embodiments, siRNAs are designed as follows. First, a portion of the target gene (e.g., the SARS-CoV-2 gene), e.g., one or more of the target sequences set forth in Table 4, Table 5, Table 6A, Table 7, or Table 8 is selected. Cleavage of mRNA at these sites should eliminate translation of corresponding protein. Antisense strands were designed based on the target sequence and sense strands were designed to be complementary to the antisense strand. Hybridization of the antisense and sense strands forms the siRNA duplex. The antisense strand includes about 19 to 25 nucleotides, e.g., 19, 20, 21, 22, 23, 24 or 25 nucleotides. In other embodiments, the antisense strand includes 20, 21, 22 or 23 nucleotides. The sense strand includes about 14 to 25 nucleotides, e.g., 14, 15, 16, 17, 18, 19, 20, 21, 22, 23, 24 or 25 nucleotides. In other embodiments, the sense strand is 15 nucleotides. In other embodiments, the sense strand is 18 nucleotides. In other embodiments, the sense strand is 20 nucleotides. The skilled artisan will appreciate, however, that siRNAs having a length of less than 19 nucleotides or greater than 25 nucleotides can also function to mediate RNAi. Accordingly, siRNAs of such length are also within the scope of the instant invention, provided that they retain the ability to mediate RNAi. Longer RNAi agents have been demonstrated to elicit an interferon or PKR response in certain mammalian cells, which may be undesirable. In certain embodiments, the RNAi agents of the invention do not elicit a PKR response (i.e., are of a sufficiently short length). However, longer RNAi agents may be useful, for example, in cell types incapable of generating a PKR response or in situations where the PKR response has been down-regulated or dampened by alternative means.

[0258] The sense strand sequence can be designed such that the target sequence is essentially in the middle of the strand. Moving the target sequence to an off-center position can, in some instances, reduce efficiency of cleavage by the siRNA. Such compositions, i.e., less efficient compositions, may be desirable for use if off-silencing of the wild-type mRNA is detected.

[0259] The antisense strand can be the same length as the sense strand and includes complementary nucleotides. In one embodiment, the strands are fully complementary, i.e., the strands are blunt-ended when aligned or annealed. In another embodiment, the strands align or anneal such that 1-, 2-, 3-, 4-, 5-, 6-, 7-, or 8-nucleotide overhangs are generated, i.e., the 3′ end of the sense strand extends 1, 2, 3, 4, 5, 6, 7, or 8 nucleotides further than the 5′ end of the antisense strand and/or the 3′ end of the antisense strand extends 1, 2, 3, 4, 5, 6, 7, or 8 nucleotides further than the 5′ end of the sense strand. Overhangs can comprise (or consist of) nucleotides corresponding to the target gene sequence (or complement thereof). Alternatively, overhangs can comprise (or consist of) deoxyribonucleotides, for example dTs, or nucleotide analogs, or other suitable non-nucleotide material.

[0260] To facilitate entry of the antisense strand into RISC (and thus increase or improve the efficiency of target cleavage and silencing), the base pair strength between the 5′ end of the sense strand and 3′ end of the antisense strand can be altered, e.g., lessened or reduced, as described in detail in U.S. Pat. Nos. 7,459,547, 7,772,203 and 7,732,593, entitled “Methods and Compositions for Controlling Efficacy of RNA Silencing” (filed Jun. 2, 2003) and U.S. Pat. Nos. 8,309,704, 7,750,144, 8,304,530, 8,329,892 and 8,309,705, entitled “Methods and Compositions for Enhancing the Efficacy and Specificity of RNAi” (filed Jun. 2, 2003), the contents of which are incorporated in their entirety by this reference. In one embodiment of these aspects of the invention, the base-pair strength is less due to fewer G:C base pairs between the 5′ end of the first or antisense strand and the 3′ end of the second or sense strand than between the 3′ end of the first or antisense strand and the 5′ end of the second or sense strand. In another embodiment, the base pair strength is less due to at least one mismatched base pair between the 5′ end of the first or antisense strand and the 3′ end of the second or sense strand. In certain exemplary embodiments, the mismatched base pair is selected from the group consisting of G:A, C:A, C:U, G:G, A:A, C:C and U:U. In another embodiment, the base pair strength is less due to at least one wobble base pair, e.g., G:U, between the 5′ end of the first or antisense strand and the 3′ end of the second or sense strand. In another embodiment, the base pair strength is less due to at least one base pair comprising a rare nucleotide, e.g., inosine (I). In certain exemplary embodiments, the base pair is selected from the group consisting of an I:A, I:U and I:C. In yet another embodiment, the base pair strength is less due to at least one base pair comprising a modified nucleotide. In certain exemplary embodiments, the modified nucleotide is selected from the group consisting of 2-amino-G, 2-amino-A, 2,6-diamino-G, and 2,6-diamino-A.

[0261] The design of siRNAs suitable for targeting the SARS-Co V-2 target sequences set forth in Table 4, Table 5, Table 6A, Table 7, or Table 8 is described in detail below. siRNAs can be designed according to the above exemplary teachings for any other target sequences found in the SARS-CoV-2 gene. Moreover, the technology is applicable to targeting any other target sequences, e.g., non-disease-causing target sequences.

[0262] To validate the effectiveness by which siRNAs destroy mRNAs (e.g., SARS-CoV-2 mRNA), the siRNA can be incubated with cDNA (e.g., SARS-CoV-2 cDNA) in a Drosophila-based in vitro mRNA expression system. Radiolabeled with ³²P, newly synthesized mRNAs (e.g., SARS-CoV-2 mRNA) are detected autoradiographically on an agarose gel. The presence of cleaved mRNA indicates mRNA nuclease activity. Suitable controls include omission of siRNA. Alternatively, control siRNAs are selected having the same nucleotide composition as the selected siRNA, but without significant sequence complementarity to the appropriate target gene. Such negative controls can be designed by randomly scrambling the nucleotide sequence of the selected siRNA; a homology search can be performed to ensure that the negative control lacks homology to any other gene in the appropriate genome. In addition, negative control siRNAs can be designed by introducing one or more base mismatches into the sequence. Sites of siRNA-mRNA complementation are selected which result in optimal mRNA specificity and maximal mRNA cleavage.

[0263] III. RNAi Agents

[0264] The present invention includes RNAi molecules, such as siRNA molecules designed, for example, as described above. The siRNA molecules of the invention can be chemically synthesized, or can be transcribed in vitro from a DNA template, or in vivo from e.g., shRNA, or by using recombinant human DICER enzyme, to cleave in vitro transcribed dsRNA templates into pools of 20-, 21- or 23-bp duplex RNA mediating RNAi. The siRNA molecules can be designed using any method known in the art.

[0265] In one aspect, instead of the RNAi agent being an interfering ribonucleic acid, e.g., an siRNA or shRNA as described above, the RNAi agent can encode an interfering ribonucleic acid, e.g., an shRNA, as described above. In other words, the RNAi agent can be a transcriptional template of the interfering ribonucleic acid. Thus, RNAi agents of the present invention can also include small hairpin RNAs (shRNAs), and expression constructs engineered to express shRNAs. Transcription of shRNAs is initiated at a polymerase III (pol III) promoter, and is thought to be terminated at position 2 of a 4-5-thymine transcription termination site. Upon expression, shRNAs are thought to fold into a stem-loop structure with 3′ UU-overhangs; subsequently, the ends of these shRNAs are processed, converting the shRNAs into siRNA-like molecules of about 21-23 nucleotides (Brummelkamp et al., 2002; Lee et al., 2002, Supra; Miyagishi et al., 2002; Paddison et al., 2002, supra; Paul et al., 2002, supra; Sui et al., 2002 supra; Yu et al., 2002, supra. More information about shRNA design and use can be found on the internet at the following addresses: katandin.cshl.org:9331/RNAi/docs/BseRI-BamHI_Strategy.pdf and katandin.cshl.org:9331/RNAi/docs/Web_version_of_PCR_strategyl.pdf).

[0266] Expression constructs of the present invention include any construct suitable for use in the appropriate expression system and include, but are not limited to, retroviral vectors, linear expression cassettes, plasmids and viral or virally-derived vectors, as known in the art. Such expression constructs can include one or more inducible promoters, RNA Pol III promoter systems, such as U6 snRNA promoters or H1 RNA polymerase III promoters, or other promoters known in the art. The constructs can include one or both strands of the siRNA. Expression constructs expressing both strands can also include loop structures linking both strands, or each strand can be separately transcribed from separate promoters within the same construct. Each strand can also be transcribed from a separate expression construct. (Tuschl, T., 2002, Supra).

[0267] Synthetic siRNAs can be delivered into cells by methods known in the art, including cationic liposome transfection and electroporation. To obtain longer term suppression of the target genes (e.g., SARS-CoV-2 genes) and to facilitate delivery under certain circumstances, one or more siRNA can be expressed within cells from recombinant DNA constructs. Such methods for expressing siRNA duplexes within cells from recombinant DNA constructs to allow longer-term target gene suppression in cells are known in the art, including mammalian Pol III promoter systems (e.g., H1 or U6/snRNA promoter systems (Tuschl, T., 2002, supra) capable of expressing functional double-stranded siRNAs; (Bagella et al., 1998; Lee et al., 2002, supra; Miyagishi et al., 2002, supra; Paul et al., 2002, supra; Yu et al., 2002, supra; Sui et al., 2002, supra). Transcriptional termination by RNA Pol III occurs at runs of four consecutive T residues in the DNA template, providing a mechanism to end the siRNA transcript at a specific sequence. The siRNA is complementary to the sequence of the target gene in 5′-3′ and 3′-5′ orientations, and the two strands of the siRNA can be expressed in the same construct or in separate constructs. Hairpin siRNAs, driven by H1 or U6 snRNA promoter and expressed in cells, can inhibit target gene expression (Bagella et al., 1998; Lee et al., 2002, supra; Miyagishi et al., 2002, supra; Paul et al., 2002, supra; Yu et al., 2002), supra; Sui et al., 2002, supra). Constructs containing siRNA sequence under the control of T7 promoter also make functional siRNAs when co-transfected into the cells with a vector expressing T7 RNA polymerase (Jacque et al., 2002, supra). A single construct may contain multiple sequences coding for siRNAs, such as multiple regions of the gene encoding SARS-CoV-2, targeting the same gene or multiple genes, and can be driven, for example, by separate PolIII promoter sites.

[0268] Animal cells express a range of noncoding RNAs of approximately 22 nucleotides termed micro RNA (miRNAs), which can regulate gene expression at the post transcriptional or translational level during animal development. One common feature of miRNAs is that they are all excised from an approximately 70 nucleotide precursor RNA stem-loop, probably by Dicer, an RNase III-type enzyme, or a homolog thereof. By substituting the stem sequences of the miRNA precursor with sequence complementary to the target mRNA, a vector construct that expresses the engineered precursor can be used to produce siRNAs to initiate RNAi against specific mRNA targets in mammalian cells (Zeng et al., 2002, supra). When expressed by DNA vectors containing polymerase III promoters, micro-RNA designed hairpins can silence gene expression (McManus et al., 2002, supra). MicroRNAs targeting polymorphisms may also be useful for blocking translation of mutant proteins, in the absence of siRNA-mediated gene-silencing. Such applications may be useful in situations, for example, where a designed siRNA caused off-target silencing of wild type protein.

[0269] Viral-mediated delivery mechanisms can also be used to induce specific silencing of targeted genes through expression of siRNA, for example, by generating recombinant adenoviruses harboring siRNA under RNA Pol II promoter transcription control (Xia et al., 2002, supra). Infection of HeLa cells by these recombinant adenoviruses allows for diminished endogenous target gene expression. Injection of the recombinant adenovirus vectors into transgenic mice expressing the target genes of the siRNA results in in vivo reduction of target gene expression. Id. In an animal model, whole-embryo electroporation can efficiently deliver synthetic siRNA into post-implantation mouse embryos (Calegari et al., 2002). In adult mice, efficient delivery of siRNA can be accomplished by “high-pressure” delivery technique, a rapid injection (within 5 seconds) of a large volume of siRNA containing solution into animal via the tail vein (Liu et al., 1999, supra; McCaffrey et al., 2002, supra; Lewis et al., 2002. Nanoparticles and liposomes can also be used to deliver siRNA into animals. In certain exemplary embodiments, recombinant adeno-associated viruses (rAAVs) and their associated vectors can be used to deliver one or more siRNAs into cells, e.g., lung (e.g., endothelial cells, epithelial cells, fibroblasts, and immune cells in the lungs, e.g. clara cells, alveolar cells, and club cells)

[0270] The nucleic acid compositions of the invention include both unmodified siRNAs and modified siRNAs, such as crosslinked siRNA derivatives or derivatives having non-nucleotide moieties linked, for example to their 3′ or 5′ ends. Modifying siRNA derivatives in this way may improve cellular uptake or enhance cellular targeting activities of the resulting siRNA derivative, as compared to the corresponding siRNA, and are useful for tracing the siRNA derivative in the cell, or improving the stability of the siRNA derivative compared to the corresponding siRNA.

[0271] Engineered RNA precursors, introduced into cells or whole organisms as described herein, will lead to the production of a desired siRNA molecule. Such an siRNA molecule will then associate with endogenous protein components of the RNAi pathway to bind to and target a specific mRNA sequence for cleavage and destruction. In this fashion, the mRNA, which will be targeted by the siRNA generated from the engineered RNA precursor, and will be depleted from the cell or organism, leading to a decrease in the concentration of the protein encoded by that mRNA in the cell or organism. The RNA precursors are typically nucleic acid molecules that individually encode either one strand of a dsRNA or encode the entire nucleotide sequence of an RNA hairpin loop structure.

[0272] The nucleic acid compositions of the invention can be unconjugated or can be conjugated to another moiety, such as a nanoparticle, to enhance a property of the compositions, e.g., a pharmacokinetic parameter such as absorption, efficacy, bioavailability and/or half-life. The conjugation can be accomplished by methods known in the art, e.g., using the methods of Lambert et al., Drug Deliv. Rev.: 47(1), 99-112 (2001) (describes nucleic acids loaded to poly alkylcy anoacrylate (PACA) nanoparticles); Fattal et al., J. Control Release 53 (1-3): 137-43 (1998) (describes nucleic acids bound to nanoparticles); Schwab et al., Ann. Oncol. 5 Suppl. 4:55-8 (1994) (describes nucleic acids linked to intercalating agents, hydrophobic groups, polycations or PACA nanoparticles); and Godard et al., Eur. J. Biochem. 232(2):404-10 (1995) (describes nucleic acids linked to nanoparticles).

[0273] The nucleic acid molecules of the present invention can also be labeled using any method known in the art. For instance, the nucleic acid compositions can be labeled with a fluorophore, e.g., Cy3, fluorescein, or rhodamine. The labeling can be carried out using a kit, e.g., the SILENCER™ siRNA labeling kit (Ambion). Additionally, the siRNA can be radiolabeled, e.g., using ³H, ³²P or another appropriate isotope.

[0274] Moreover, because RNAi is believed to progress via at least one single-stranded RNA intermediate, the skilled artisan will appreciate that ss-siRNAs (e.g., the antisense strand of a ds-siRNA) can also be designed (e.g., for chemical synthesis), generated (e.g., enzymatically generated), or expressed (e.g., from a vector or plasmid) as described herein and utilized according to the claimed methodologies. Moreover, in invertebrates, RNAi can be triggered effectively by long dsRNAs (e.g., dsRNAs about 100-1000 nucleotides in length, such as about 200-500, for example, about 250, 300, 350, 400 or 450 nucleotides in length) acting as effectors of RNAi. (Brondani et al., Proc Natl Acad Sci USA. 2001 Dec. 4; 98(25):14428-33. Epub 2001 Nov. 27.)

[0275] IV. Anti-SARS-CoV-2 RNA Silencing Agents

[0276] In certain embodiment, the present invention provides novel anti-SARS-CoV-2 RNA silencing agents (e.g., siRNA, shRNA, and antisense oligonucleotides), methods of making said RNA silencing agents, and methods (e.g., research and/or therapeutic methods) for using said improved RNA silencing agents (or portions thereof) for RNA silencing of SARS-CoV-2 protein. The RNA silencing agents comprise an antisense strand (or portions thereof), wherein the antisense strand has sufficient complementary to a target SARS-CoV-2 mRNA to mediate an RNA-mediated silencing mechanism (e.g. RNAi).

[0277] In certain embodiments, siRNA compounds are provided having one or any combination of the following properties: (1) fully chemically-stabilized (i.e., no unmodified 2′-OH residues); (2) asymmetry; (3) 11-20 base pair duplexes; (4) greater than 50% 2′-methoxy modifications, such as 70%-100% 2′-methoxy modifications, although an alternating pattern of chemically-modified nucleotides (e.g., 2′-fluoro and 2′-methoxy modifications), are also contemplated; and (5) single-stranded, fully phosphorothioated tails of 5-8 bases. In certain embodiments, the number of phosphorothioate modifications is varied from 4 to 16 total. In certain embodiments, the number of phosphorothioate modifications is varied from 8 to 13 total.

[0278] In certain embodiments, the siRNA compounds described herein can be conjugated to a variety of targeting agents, including, but not limited to, docosanoic acid (DCA), cholesterol, docosahexaenoic acid (DHA), phenyltropanes, cortisol, vitamin A, vitamin D, N-acetylgalactosamine (GalNac), and gangliosides. The cholesterol-modified version showed 5-10 fold improvement in efficacy in vitro versus previously used chemical stabilization patterns (e.g., wherein all purine but not pyrimidines are modified) in wide range of cell types (e.g., HeLa, neurons, hepatocytes, trophoblasts. lung epithelial cells).

[0279] Certain compounds of the invention having the structural properties described above and herein may be referred to as “hsiRNA-ASP” (hydrophobically-modified, small interfering RNA, featuring an advanced stabilization pattern). In addition, siRNAs conjugated to DCA or EPA and containing different numbers of 3′ exNA modifications and phosphorothioates showed a dramatically improved distribution through the lung, making them accessible for therapeutic intervention.

[0280] In certain embodiments, the siRNA comprises between 6 and 13 total phosphorothioate modifications. In certain embodiments, the siRNA comprises 6 phosphorothioate modifications. In certain embodiments, the siRNA comprises 8 phosphorothioate modifications. In certain embodiments, the siRNA antisense strand comprises 6 phosphorothioate modifications. In certain embodiments, the siRNA antisense strand comprises 4 phosphorothioate modifications. In certain embodiments, the siRNA sense strand comprises 2 phosphorothioate modifications.

[0281] In certain embodiments, the siRNA sense strand 3′ end is conjugated to DCA. In certain embodiments, the siRNA sense strand 3′ end is conjugated to EPA.

[0282] In certain embodiments, the siRNA antisense strand comprises two to five 3′ exNA modifications. In certain embodiments, the siRNA antisense strand comprises two 3′ exNA modifications. In certain embodiments, the siRNA antisense strand comprises three 3′ exNA modifications. In certain embodiments, the siRNA antisense strand comprises four 3′ exNA modifications. In certain embodiments, the siRNA antisense strand comprises five 3′ exNA modifications. In certain embodiments, the siRNA antisense strand comprises four consecutive 3′ exNA modifications.

[0283] In certain embodiments, the siRNA antisense strand comprises two to five 3′ exNA modifications and 6 phosphorothioate modifications. In certain embodiments, the siRNA antisense strand comprises two to five 3′ exNA modifications and 4 phosphorothioate modifications. In certain embodiments, the siRNA antisense strand comprises four 3′ exNA modifications and 6 phosphorothioate modifications. In certain embodiments, the siRNA antisense strand comprises four 3′ exNA modifications and 4 phosphorothioate modifications.

[0284] The compounds of the invention can be described in the following aspects and embodiments.

[0285] In a first aspect, provided herein is a double stranded RNA (dsRNA) comprising an antisense strand and a sense strand, each strand comprising at least 14 contiguous nucleotides, with a 5′ end and a 3′ end, wherein:

[0286] (1) the antisense strand comprises a sequence substantially complementary to a SARS-CoV-2 nucleic acid sequence of any one of the 45-nucleotide target gene regions in Table 6A;

[0287] (2) the antisense strand comprises alternating 2′-methoxy-ribonucleotides and 2′-fluoro-ribonucleotides;

[0288] (3) the nucleotides at positions 2 and 14 from the 5′ end of the antisense strand are not 2′-methoxy-ribonucleotides;

[0289] (4) the nucleotides at positions 1-2 to 1-7 from the 3′ end of the antisense strand are connected to each other via phosphorothioate internucleotide linkages;

[0290] (5) a portion of the antisense strand is complementary to a portion of the sense strand;

[0291] (6) the sense strand comprises alternating 2′-methoxy-ribonucleotides and 2′-fluoro-ribonucleotides; and

[0292] (7) the nucleotides at positions 1-2 from the 5′ end of the sense strand are connected to each other via phosphorothioate internucleotide linkages.

[0293] In a second aspect, provided herein is a dsRNA comprising an antisense strand and a sense strand, each strand comprising at least 14 contiguous nucleotides, with a 5′ end and a 3′ end, wherein:

[0294] (1) the antisense strand comprises a sequence substantially complementary to a SARS-CoV-2 nucleic acid sequence of any one of the 45-nucleotide target gene regions in Table 6A;

[0295] (2) the antisense strand comprises at least 70% 2′-O-methyl modifications;

[0296] (3) the nucleotide at position 14 from the 5′ end of the antisense strand are not 2′-methoxy-ribonucleotides;

[0297] (4) the nucleotides at positions 1-2 to 1-7 from the 3′ end of the antisense strand are connected to each other via phosphorothioate internucleotide linkages;

[0298] (5) a portion of the antisense strand is complementary to a portion of the sense strand;

[0299] (6) the sense strand comprises at least 70% 2′-O-methyl modifications; and

[0300] (7) the nucleotides at positions 1-2 from the 5′ end of the sense strand are connected to each other via phosphorothioate internucleotide linkages.

[0301] In a third aspect, provided herein is a dsRNA comprising an antisense strand and a sense strand, each strand comprising at least 14 contiguous nucleotides, with a 5′ end and a 3′ end, wherein:

[0302] (1) the antisense strand comprises a sequence substantially complementary to a SARS-CoV-2 nucleic acid sequence of any one of the 45-nucleotide target gene regions in Table 6A;

[0303] (2) the antisense strand comprises at least 85% 2′-O-methyl modifications;

[0304] (3) the nucleotides at positions 2 and 14 from the 5′ end of the antisense strand are not 2′-methoxy-ribonucleotides;

[0305] (4) the nucleotides at positions 1-2 to 1-7 from the 3′ end of the antisense strand are connected to each other via phosphorothioate internucleotide linkages;

[0306] (5) a portion of the antisense strand is complementary to a portion of the sense strand;

[0307] (6) the sense strand comprises 100% 2′-O-methyl modifications; and

[0308] (7) the nucleotides at positions 1-2 from the 5′ end of the sense strand are connected to each other via phosphorothioate internucleotide linkages.

[0309] In a fourth aspect, provided herein is a dsRNA comprising an antisense strand and a sense strand, each strand comprising at least 14 contiguous nucleotides, with a 5′ end and a 3′ end, wherein:

[0310] (1) the antisense strand comprises a sequence substantially complementary to a SARS-CoV-2 nucleic acid sequence of any one of the 45-nucleotide target gene regions in Table 6A;

[0311] (2) the antisense strand comprises at least 75% 2′-O-methyl modifications;

[0312] (3) the nucleotides at positions 4, 5, 6, and 14 from the 5′ end of the antisense strand are not 2′-methoxy-ribonucleotides;

[0313] (4) the nucleotides at positions 1-2 to 1-7 from the 3′ end of the antisense strand are connected to each other via phosphorothioate internucleotide linkages;

[0314] (5) a portion of the antisense strand is complementary to a portion of the sense strand;

[0315] (6) the sense strand comprises 100% 2′-O-methyl modifications; and

[0316] (7) the nucleotides at positions 1-2 from the 5′ end of the sense strand are connected to each other via phosphorothioate internucleotide linkages.

[0317] In a fifth aspect, provided herein is a dsRNA comprising an antisense strand and a sense strand, each strand comprising at least 14 contiguous nucleotides, with a 5′ end and a 3′ end, wherein:

[0318] (1) the antisense strand comprises a sequence substantially complementary to a SARS-CoV-2 nucleic acid sequence of any one of the 45-nucleotide target gene regions in Table 6A;

[0319] (2) the antisense strand comprises at least 75% 2′-O-methyl modifications;

[0320] (3) the nucleotides at positions 2, 4, 5, 6, and 14 from the 5′ end of the antisense strand are not 2′-methoxy-ribonucleotides;

[0321] (4) the nucleotides at positions 1-2 to 1-7 from the 3′ end of the antisense strand are connected to each other via phosphorothioate internucleotide linkages;

[0322] (5) a portion of the antisense strand is complementary to a portion of the sense strand;

[0323] (6) the sense strand comprises 100% 2′-O-methyl modifications; and

[0324] (7) the nucleotides at positions 1-2 from the 5′ end of the sense strand are connected to each other via phosphorothioate internucleotide linkages.

[0325] In a sixth aspect, provided herein is a dsRNA comprising an antisense strand and a sense strand, each strand comprising at least 14 contiguous nucleotides, with a 5′ end and a 3′ end, wherein:

[0326] (1) the antisense strand comprises a sequence substantially complementary to a SARS-CoV-2 nucleic acid sequence of any one of the 45-nucleotide target gene regions in Table 6A;

[0327] (2) the antisense strand comprises at least 75% 2′-O-methyl modifications;

[0328] (3) the nucleotides at positions 2, 6, 14, and 16 from the 5′ end of the antisense strand are not 2′-methoxy-ribonucleotides;

[0329] (4) the nucleotides at positions 1-2 to 1-7 from the 3′ end of the antisense strand are connected to each other via phosphorothioate internucleotide linkages;

[0330] (5) a portion of the antisense strand is complementary to a portion of the sense strand;

[0331] (6) the sense strand comprises at least 70% 2′-O-methyl modifications; (7) the nucleotides at positions 7, 9, 10, and 11 from the 3′ end of the sense strand are not 2′-methoxy-ribonucleotides; and

[0332] (8) the nucleotides at positions 1-2 from the 5′ end of the sense strand are connected to each other via phosphorothioate internucleotide linkages.

[0333] In a seventh aspect, provided herein is a dsRNA comprising an antisense strand and a sense strand, each strand comprising at least 14 contiguous nucleotides, with a 5′ end and a 3′ end, wherein:

[0334] (1) the antisense strand comprises a sequence substantially complementary to a SARS-CoV-2 nucleic acid sequence of any one of the 45-nucleotide target gene regions in Table 6A;

[0335] (2) the antisense strand comprises at least 75% 2′-O-methyl modifications;

[0336] (3) the nucleotides at positions 2, 6, and 14 from the 5′ end of the antisense strand are not 2′-methoxy-ribonucleotides;

[0337] (4) the nucleotides at positions 1-2 to 1-7 from the 3′ end of the antisense strand are connected to each other via phosphorothioate internucleotide linkages;

[0338] (5) a portion of the antisense strand is complementary to a portion of the sense strand;

[0339] (6) the sense strand comprises at least 80% 2′-O-methyl modifications;

[0340] (7) the nucleotides at positions 7, 10, and 11 from the 3′ end of the sense strand are not 2′-methoxy-ribonucleotides; and

[0341] (8) the nucleotides at positions 1-2 from the 5′ end of the sense strand are connected to each other via phosphorothioate internucleotide linkages.

[0342] a) Design of Anti-SARS-CoV-2 siRNA Molecules

[0343] An siRNA molecule of the application is a duplex made of a sense strand and complementary antisense strand, the antisense strand having sufficient complementary to a SARS-CoV-2 mRNA to mediate RNAi. In certain embodiments, the siRNA molecule has a length from about 10-50 or more nucleotides, i.e., each strand comprises 10-50 nucleotides (or nucleotide analogs). In other embodiments, the siRNA molecule has a length from about 15-30, e.g., 15, 16, 17, 18, 19, 20, 21, 22, 23, 24, 25, 26, 27, 28, 29, or 30 nucleotides in each strand, wherein one of the strands is sufficiently complementary to a target region. In certain embodiments, the strands are aligned such that there are at least 1, 2, 3, 4, 5, 6, 7, 8, 9, or 10 bases at the end of the strands, which do not align (i.e., for which no complementary bases occur in the opposing strand), such that an overhang of 1, 2, 3, 4, 5, 6, 7, 8, 9, or 10 residues occurs at one or both ends of the duplex when strands are annealed.

[0344] Usually, siRNAs can be designed by using any method known in the art, for instance, by using the following protocol:

[0345] 1. The siRNA should be specific for a target sequence, e.g., a target sequence set forth in the Examples. The first strand should be complementary to the target sequence, and the other strand is substantially complementary to the first strand. (See Examples for exemplary sense and antisense strands.) Exemplary target sequences are selected from any region of the target gene that leads to potent gene silencing. Regions of the target gene include, but are not limited to, the 5′ untranslated region (5′-UTR) of a target gene, the 3′ untranslated region (3′-UTR) of a target gene, an exon of a target gene, or an intron of a target gene. Cleavage of mRNA at these sites should eliminate translation of corresponding SARS-CoV-2 protein. Target sequences from other regions of the SARS-CoV-2 gene are also suitable for targeting. A sense strand is designed based on the target sequence.

[0346] 2. The sense strand of the siRNA is designed based on the sequence of the selected target site. In certain embodiments, the sense strand includes about 15 to 25 nucleotides, e.g., 15, 16, 17, 18, 19, 20, 21, 22, 23, 24 or 25 nucleotides. In certain embodiments, the sense strand includes 15, 16, 17, 18, 19, or 20 nucleotides. In certain embodiments, the sense strand is 15 nucleotides in length. In certain embodiments, the sense strand is 18 nucleotides in length. In certain embodiments, the sense strand is 20 nucleotides in length. The skilled artisan will appreciate, however, that siRNAs having a length of less than 15 nucleotides or greater than 25 nucleotides can also function to mediate RNAi. Accordingly, siRNAs of such length are also within the scope of the instant invention, provided that they retain the ability to mediate RNAi. Longer RNA silencing agents have been demonstrated to elicit an interferon or Protein Kinase R (PKR) response in certain mammalian cells which may be undesirable. In certain embodiments, the RNA silencing agents of the invention do not elicit a PKR response (i.e., are of a sufficiently short length). However, longer RNA silencing agents may be useful, for example, in cell types incapable of generating a PKR response or in situations where the PKR response has been down-regulated or dampened by alternative means.

[0347] The siRNA molecules of the invention have sufficient complementarity with the target sequence such that the siRNA can mediate RNAi. In general, siRNA containing nucleotide sequences sufficiently complementary to a target sequence portion of the target gene to effect RISC-mediated cleavage of the target gene are contemplated. Accordingly, in a certain embodiment, the antisense strand of the siRNA is designed to have a sequence sufficiently complementary to a portion of the target. For example, the antisense strand may have 100% complementarity to the target site. However, 100% complementarity is not required. Greater than 80% identity, e.g., 80%, 81%, 82%, 83%, 84%, 85%, 86%, 87%, 88%, 89%, 90%, 91%, 92%, 93%, 94%, 95%, 96%, 97%, 98%, 99% or even 100% complementarity, between the antisense strand and the target RNA sequence is contemplated. The present application has the advantage of being able to tolerate certain sequence variations to enhance efficiency and specificity of RNAi. In one embodiment, the antisense strand has 4, 3, 2, 1, or 0 mismatched nucleotide(s) with a target region, such as a target region that differs by at least one base pair between a wild-type and mutant allele, e.g., a target region comprising the gain-of-function mutation, and the other strand is identical or substantially identical to the first strand. Moreover, siRNA sequences with small insertions or deletions of 1 or 2 nucleotides may also be effective for mediating RNAi. Alternatively, siRNA sequences with nucleotide analog substitutions or insertions can be effective for inhibition.

[0348] Sequence identity may be determined by sequence comparison and alignment algorithms known in the art. To determine the percent identity of two nucleic acid sequences (or of two amino acid sequences), the sequences are aligned for optimal comparison purposes (e.g., gaps can be introduced in the first sequence or second sequence for optimal alignment). The nucleotides (or amino acid residues) at corresponding nucleotide (or amino acid) positions are then compared. When a position in the first sequence is occupied by the same residue as the corresponding position in the second sequence, then the molecules are identical at that position. The percent identity between the two sequences is a function of the number of identical positions shared by the sequences (i.e., % homology=number of identical positions/total number of positions×100), optionally penalizing the score for the number of gaps introduced and/or length of gaps introduced.

[0349] The comparison of sequences and determination of percent identity between two sequences can be accomplished using a mathematical algorithm. In one embodiment, the alignment generated over a certain portion of the sequence aligned having sufficient identity but not over portions having low degree of identity (i.e., a local alignment). A non-limiting example of a local alignment algorithm utilized for the comparison of sequences is the algorithm of Karlin and Altschul (1990) Proc. Natl. Acad. Sci. USA 87:2264-68, modified as in Karlin and Altschul (1993) Proc. Natl. Acad. Sci. USA 90:5873-77. Such an algorithm is incorporated into the BLAST programs (version 2.0) of Altschul, et al. (1990) J. Mol. Biol. 215:403-10.

[0350] In another embodiment, the alignment is optimized by introducing appropriate gaps and the percent identity is determined over the length of the aligned sequences (i.e., a gapped alignment). To obtain gapped alignments for comparison purposes, Gapped BLAST can be utilized as described in Altschul et al., (1997) Nucleic Acids Res. 25(17):3389-3402. In another embodiment, the alignment is optimized by introducing appropriate gaps and percent identity is determined over the entire length of the sequences aligned (i.e., a global alignment). A non-limiting example of a mathematical algorithm utilized for the global comparison of sequences is the algorithm of Myers and Miller, CABIOS (1989). Such an algorithm is incorporated into the ALIGN program (version 2.0) which is part of the GCG sequence alignment software package. When utilizing the ALIGN program for comparing amino acid sequences, a PAM120 weight residue table, a gap length penalty of 12, and a gap penalty of 4 can be used.

[0351] 3. The antisense or guide strand of the siRNA is routinely the same length as the sense strand and includes complementary nucleotides. In one embodiment, the guide and sense strands are fully complementary, i.e., the strands are blunt-ended when aligned or annealed. In another embodiment, the strands of the siRNA can be paired in such a way as to have a 3′ overhang of 1 to 7 (e.g., 2, 3, 4, 5, 6 or 7), or 1 to 4, e.g., 2, 3 or 4 nucleotides. Overhangs can comprise (or consist of) nucleotides corresponding to the target gene sequence (or complement thereof). Alternatively, overhangs can comprise (or consist of) deoxyribonucleotides, for example dTs, or nucleotide analogs, or other suitable non-nucleotide material. Thus, in another embodiment, the nucleic acid molecules may have a 3′ overhang of 2 nucleotides, such as TT. The overhanging nucleotides may be either RNA or DNA. As noted above, it is desirable to choose a target region wherein the mutant:wild type mismatch is a purine:purine mismatch.

[0352] 4. Using any method known in the art, compare the potential targets to the appropriate genome database (human, mouse, rat, etc.) and eliminate from consideration any target sequences with significant homology to other coding sequences. One such method for such sequence homology searches is known as BLAST, which is available at National Center for Biotechnology Information website.

[0353] 5. Select one or more sequences that meet your criteria for evaluation.

[0354] Further general information about the design and use of siRNA may be found in “The siRNA User Guide,” available at The Max-Plank-Institut fur Biophysikalische Chemie website.

[0355] Alternatively, the siRNA may be defined functionally as a nucleotide sequence (or oligonucleotide sequence) that is capable of hybridizing with the target sequence (e.g., 400 mM NaCl, 40 mM PIPES pH 6.4, 1 mM EDTA, 50° C. or 70° C. hybridization for 12-16 hours; followed by washing). Additional hybridization conditions include hybridization at 70° C. in 1×SSC or 50° C. in 1×SSC, 50% formamide followed by washing at 70° C. in 0.3×SSC or hybridization at 70° C. in 4×SSC or 50° C. in 4×SSC, 50% formamide followed by washing at 67° C. in 1×SSC. The hybridization temperature for hybrids anticipated to be less than 50 base pairs in length should be 5-10° C. less than the melting temperature (Tₘ) of the hybrid, where Tₘ is determined according to the following equations. For hybrids less than 18 base pairs in length, Tₘ(° C.)=2 (# of A+T bases)+4 (# of G+C bases). For hybrids between 18 and 49 base pairs in length, Tₘ(° C.)=81.5+16.6 (log 10[Na+])+0.41 (% G+C)−(600/N), where N is the number of bases in the hybrid, and [Na+] is the concentration of sodium ions in the hybridization buffer ([Na⁺] for 1×SSC=0.165 M). Additional examples of stringency conditions for polynucleotide hybridization are provided in Sambrook, J., E. F. Fritsch, and T. Maniatis, 1989, Molecular Cloning: A Laboratory Manual, Cold Spring Harbor Laboratory Press, Cold Spring Harbor, N.Y., chapters 9 and 11, and Current Protocols in Molecular Biology, 1995, F. M. Ausubel et al., eds., John Wiley & Sons, Inc., sections 2.10 and 6.3-6.4, incorporated herein by reference.

[0356] Negative control siRNAs should have the same nucleotide composition as the selected siRNA, but without significant sequence complementarity to the appropriate genome. Such negative controls may be designed by randomly scrambling the nucleotide sequence of the selected siRNA. A homology search can be performed to ensure that the negative control lacks homology to any other gene in the appropriate genome. In addition, negative control siRNAs can be designed by introducing one or more base mismatches into the sequence.

[0357] 6. To validate the effectiveness by which siRNAs destroy target mRNAs (e.g., wild-type or mutant SARS-CoV-2 mRNA), the siRNA may be incubated with target cDNA (e.g., SARS-CoV-2 cDNA) in a Drosophila-based in vitro mRNA expression system. Radiolabeled with ³²P, newly synthesized target mRNAs (e.g., SARS-CoV-2 mRNA) are detected autoradiographically on an agarose gel. The presence of cleaved target mRNA indicates mRNA nuclease activity. Suitable controls include omission of siRNA and use of non-target cDNA. Alternatively, control siRNAs are selected having the same nucleotide composition as the selected siRNA, but without significant sequence complementarity to the appropriate target gene. Such negative controls can be designed by randomly scrambling the nucleotide sequence of the selected siRNA. A homology search can be performed to ensure that the negative control lacks homology to any other gene in the appropriate genome. In addition, negative control siRNAs can be designed by introducing one or more base mismatches into the sequence.

[0358] Anti-SARS-CoV-2 siRNAs may be designed to target any of the target sequences described supra. Said siRNAs comprise an antisense strand, which is sufficiently complementary with the target sequence to mediate silencing of the target sequence. In certain embodiments, the RNA silencing agent is a siRNA.

[0359] In certain embodiments, the siRNA comprises a sense strand comprising a sequence set forth in Table 6C or Table 6D, and an antisense strand comprising a sequence set forth in Table 6B.

[0360] Sites of siRNA-mRNA complementation are selected, which result in optimal mRNA specificity and maximal mRNA cleavage.

[0361] b) siRNA-Like Molecules

[0362] siRNA-like molecules of the invention have a sequence (i.e., have a strand having a sequence) that is “sufficiently complementary” to a target sequence of an SARS-CoV-2 mRNA to direct gene silencing either by RNAi or translational repression. siRNA-like molecules are designed in the same way as siRNA molecules, but the degree of sequence identity between the sense strand and target RNA approximates that observed between a miRNA and its target. In general, as the degree of sequence identity between a miRNA sequence and the corresponding target gene sequence is decreased, the tendency to mediate post-transcriptional gene silencing by translational repression rather than RNAi is increased. Therefore, in an alternative embodiment, where post-transcriptional gene silencing by translational repression of the target gene is desired, the miRNA sequence has partial complementarity with the target gene sequence. In certain embodiments, the miRNA sequence has partial complementarity with one or more short sequences (complementarity sites) dispersed within the target mRNA (e.g. within the 3′-UTR of the target mRNA) (Hutvagner and Zamore, Science, 2002; Zeng et al., Mol. Cell, 2002; Zeng et al., RNA, 2003; Doench et al., Genes & Dev., 2003). Since the mechanism of translational repression is cooperative, multiple complementarity sites (e.g., 2, 3, 4, 5, or 6) may be targeted in certain embodiments.

[0363] The capacity of a siRNA-like duplex to mediate RNAi or translational repression may be predicted by the distribution of non-identical nucleotides between the target gene sequence and the nucleotide sequence of the silencing agent at the site of complementarity. In one embodiment, where gene silencing by translational repression is desired, at least one non-identical nucleotide is present in the central portion of the complementarity site so that duplex formed by the miRNA guide strand and the target mRNA contains a central “bulge” (Doench J G et al., Genes & Dev., 2003). In another embodiment 2, 3, 4, 5, or 6 contiguous or non-contiguous non-identical nucleotides are introduced. The non-identical nucleotide may be selected such that it forms a wobble base pair (e.g., G:U) or a mismatched base pair (G:A, C:A, C:U, G:G, A:A, C:C, U:U). In a further embodiment, the “bulge” is centered at nucleotide positions 12 and 13 from the 5′ end of the miRNA molecule.

[0364] c) Short Hairpin RNA (shRNA) Molecules

[0365] In certain featured embodiments, the instant invention provides shRNAs capable of mediating RNA silencing of an SARS-CoV-2 target sequence with enhanced selectivity. In contrast to siRNAs, shRNAs mimic the natural precursors of micro RNAs (miRNAs) and enter at the top of the gene silencing pathway. For this reason, shRNAs are believed to mediate gene silencing more efficiently by being fed through the entire natural gene silencing pathway.

[0366] miRNAs are noncoding RNAs of approximately 22 nucleotides, which can regulate gene expression at the post transcriptional or translational level during plant and animal development. One common feature of miRNAs is that they are all excised from an approximately 70 nucleotide precursor RNA stem-loop termed pre-miRNA, probably by Dicer, an RNase III-type enzyme, or a homolog thereof. Naturally-occurring miRNA precursors (pre-miRNA) have a single strand that forms a duplex stem including two portions that are generally complementary, and a loop, that connects the two portions of the stem. In typical pre-miRNAs, the stem includes one or more bulges, e.g., extra nucleotides that create a single nucleotide “loop” in one portion of the stem, and/or one or more unpaired nucleotides that create a gap in the hybridization of the two portions of the stem to each other. Short hairpin RNAs, or engineered RNA precursors, of the present application are artificial constructs based on these naturally occurring pre-miRNAs, but which are engineered to deliver desired RNA silencing agents (e.g., siRNAs of the invention). By substituting the stem sequences of the pre-miRNA with sequence complementary to the target mRNA, a shRNA is formed. The shRNA is processed by the entire gene silencing pathway of the cell, thereby efficiently mediating RNAi.

[0367] The requisite elements of a shRNA molecule include a first portion and a second portion, having sufficient complementarity to anneal or hybridize to form a duplex or double-stranded stem portion. The two portions need not be fully or perfectly complementary. The first and second “stem” portions are connected by a portion having a sequence that has insufficient sequence complementarity to anneal or hybridize to other portions of the shRNA. This latter portion is referred to as a “loop” portion in the shRNA molecule. The shRNA molecules are processed to generate siRNAs. shRNAs can also include one or more bulges, i.e., extra nucleotides that create a small nucleotide “loop” in a portion of the stem, for example a one-, two- or three-nucleotide loop. The stem portions can be the same length, or one portion can include an overhang of, for example, 1-5 nucleotides. The overhanging nucleotides can include, for example, uracils (Us), e.g., all Us. Such Us are notably encoded by thymidines (Ts) in the shRNA-encoding DNA which signal the termination of transcription.

[0368] In shRNAs (or engineered precursor RNAs) of the instant invention, one portion of the duplex stem is a nucleic acid sequence that is complementary (or anti-sense) to the SARS-CoV-2 target sequence. In certain embodiments, one strand of the stem portion of the shRNA is sufficiently complementary (e.g., antisense) to a target RNA (e.g., mRNA) sequence to mediate degradation or cleavage of said target RNA via RNA interference (RNAi). Thus, engineered RNA precursors include a duplex stem with two portions and a loop connecting the two stem portions. The antisense portion can be on the 5′ or 3′ end of the stem. The stem portions of a shRNA are about 15 to about 50 nucleotides in length. In certain embodiments, the two stem portions are about 18 or 19 to about 21, 22, 23, 24, 25, 30, 35, 37, 38, 39, or 40 or more nucleotides in length. In certain embodiments, the length of the stem portions should be 21 nucleotides or greater. When used in mammalian cells, the length of the stem portions should be less than about 30 nucleotides to avoid provoking non-specific responses like the interferon pathway. In non-mammalian cells, the stem can be longer than 30 nucleotides. In fact, the stem can include much larger sections complementary to the target mRNA (up to, and including the entire mRNA). In fact, a stem portion can include much larger sections complementary to the target mRNA (up to, and including the entire mRNA).

[0369] The two portions of the duplex stem must be sufficiently complementary to hybridize to form the duplex stem. Thus, the two portions can be, but need not be, fully or perfectly complementary. In addition, the two stem portions can be the same length, or one portion can include an overhang of 1, 2, 3, or 4 nucleotides. The overhanging nucleotides can include, for example, uracils (Us), e.g., all Us. The loop in the shRNAs or engineered RNA precursors may differ from natural pre-miRNA sequences by modifying the loop sequence to increase or decrease the number of paired nucleotides, or replacing all or part of the loop sequence with a tetraloop or other loop sequences. Thus, the loop in the shRNAs or engineered RNA precursors can be 2, 3, 4, 5, 6, 7, 8, 9, or more, e.g., 15 or 20, or more nucleotides in length.

[0370] The loop in the shRNAs or engineered RNA precursors may differ from natural pre-miRNA sequences by modifying the loop sequence to increase or decrease the number of paired nucleotides, or replacing all or part of the loop sequence with a tetraloop or other loop sequences. Thus, the loop portion in the shRNA can be about 2 to about 20 nucleotides in length, i.e., about 2, 3, 4, 5, 6, 7, 8, 9, or more, e.g., 15 or 20, or more nucleotides in length. In certain embodiments, a loop consists of or comprises a “tetraloop” sequence. Exemplary tetraloop sequences include, but are not limited to, the sequences GNRA, where N is any nucleotide and R is a purine nucleotide, GGGG, and UUUU.

[0371] In certain embodiments, shRNAs of the present application include the sequences of a desired siRNA molecule described supra. In other embodiments, the sequence of the antisense portion of a shRNA can be designed essentially as described above or generally by selecting an 18, 19, 20, 21 nucleotides, or longer, sequence from within the target RNA (e.g., SARS-CoV-2 mRNA), for example, from a region 100 to 200 or 300 nucleotides upstream or downstream of the start of translation. In general, the sequence can be selected from any portion of the target RNA (e.g., mRNA) including the 5′ UTR (untranslated region), coding sequence, or 3′ UTR. This sequence can optionally follow immediately after a region of the target gene containing two adjacent AA nucleotides. The last two nucleotides of the nucleotide sequence can be selected to be UU. This 21 or so nucleotide sequence is used to create one portion of a duplex stem in the shRNA. This sequence can replace a stem portion of a wild-type pre-miRNA sequence, e.g., enzymatically, or is included in a complete sequence that is synthesized. For example, one can synthesize DNA oligonucleotides that encode the entire stem-loop engineered RNA precursor, or that encode just the portion to be inserted into the duplex stem of the precursor, and using restriction enzymes to build the engineered RNA precursor construct, e.g., from a wild-type pre-miRNA.

[0372] Engineered RNA precursors include, in the duplex stem, the 21-22 or so nucleotide sequences of the siRNA or siRNA-like duplex desired to be produced in vivo. Thus, the stem portion of the engineered RNA precursor includes at least 18 or 19 nucleotide pairs corresponding to the sequence of an exonic portion of the gene whose expression is to be reduced or inhibited. The two 3′ nucleotides flanking this region of the stem are chosen so as to maximize the production of the siRNA from the engineered RNA precursor and to maximize the efficacy of the resulting siRNA in targeting the corresponding mRNA for translational repression or destruction by RNAi in vivo and in vitro.

[0373] In certain embodiments, shRNAs of the invention include miRNA sequences, optionally end-modified miRNA sequences, to enhance entry into RISC. The miRNA sequence can be similar or identical to that of any naturally occurring miRNA (see e.g. The miRNA Registry; Griffiths-Jones S, Nuc. Acids Res., 2004). Over one thousand natural miRNAs have been identified to date and together they are thought to comprise about 1% of all predicted genes in the genome. Many natural miRNAs are clustered together in the introns of pre-mRNAs and can be identified in silico using homology-based searches (Pasquinelli et al., 2000; Lagos-Quintana et al., 2001; Lau et al., 2001; Lee and Ambros, 2001) or computer algorithms (e.g. MiRScan, MiRSeeker) that predict the capability of a candidate miRNA gene to form the stem loop structure of a pri-mRNA (Grad et al., Mol. Cell., 2003; Lim et al., Genes Dev., 2003; Lim et al., Science, 2003; Lai E C et al., Genome Bio., 2003). An online registry provides a searchable database of all published miRNA sequences (The miRNA Registry at the Sanger Institute website; Griffiths-Jones S, Nuc. Acids Res., 2004). Exemplary, natural miRNAs include lin-4, let-7, miR-10, mirR-15, miR-16, miR-168, miR-175, miR-196 and their homologs, as well as other natural miRNAs from humans and certain model organisms including Drosophila melanogaster, Caenorhabditis elegans, zebrafish, Arabidopsis thalania, Mus musculus, and Rattus norvegicus as described in International PCT Publication No. WO 03/029459.

[0374] Naturally-occurring miRNAs are expressed by endogenous genes in vivo and are processed from a hairpin or stem-loop precursor (pre-miRNA or pri-miRNAs) by Dicer or other RNAses (Lagos-Quintana et al., Science, 2001; Lau et al., Science, 2001; Lee and Ambros, Science, 2001; Lagos-Quintana et al., Curr. Biol., 2002; Mourelatos et al., Genes Dev., 2002; Reinhart et al., Science, 2002; Ambros et al., Curr. Biol., 2003; Brennecke et al., 2003; Lagos-Quintana et al., RNA, 2003; Lim et al., Genes Dev., 2003; Lim et al., Science, 2003). miRNAs can exist transiently in vivo as a double-stranded duplex, but only one strand is taken up by the RISC complex to direct gene silencing. Certain miRNAs, e.g., plant miRNAs, have perfect or near-perfect complementarity to their target mRNAs and, hence, direct cleavage of the target mRNAs. Other miRNAs have less than perfect complementarity to their target mRNAs and, hence, direct translational repression of the target mRNAs. The degree of complementarity between a miRNA and its target mRNA is believed to determine its mechanism of action. For example, perfect or near-perfect complementarity between a miRNA and its target mRNA is predictive of a cleavage mechanism (Yekta et al., Science, 2004), whereas less than perfect complementarity is predictive of a translational repression mechanism. In certain embodiments, the miRNA sequence is that of a naturally-occurring miRNA sequence, the aberrant expression or activity of which is correlated with a miRNA disorder.

[0375] d) Dual Functional Oligonucleotide Tethers

[0376] In other embodiments, the RNA silencing agents of the present invention include dual functional oligonucleotide tethers useful for the intercellular recruitment of a miRNA. Animal cells express a range of miRNAs, noncoding RNAs of approximately 22 nucleotides which can regulate gene expression at the post transcriptional or translational level. By binding a miRNA bound to RISC and recruiting it to a target mRNA, a dual functional oligonucleotide tether can repress the expression of genes involved e.g., in the arteriosclerotic process. The use of oligonucleotide tethers offers several advantages over existing techniques to repress the expression of a particular gene. First, the methods described herein allow an endogenous molecule (often present in abundance), a miRNA, to mediate RNA silencing. Accordingly, the methods described herein obviate the need to introduce foreign molecules (e.g., siRNAs) to mediate RNA silencing. Second, the RNA-silencing agents and the linking moiety (e.g., oligonucleotides such as the 2′-O-methyl oligonucleotide), can be made stable and resistant to nuclease activity. As a result, the tethers of the present invention can be designed for direct delivery, obviating the need for indirect delivery (e.g. viral) of a precursor molecule or plasmid designed to make the desired agent within the cell. Third, tethers and their respective moieties, can be designed to conform to specific mRNA sites and specific miRNAs. The designs can be cell and gene product specific. Fourth, the methods disclosed herein leave the mRNA intact, allowing one skilled in the art to block protein synthesis in short pulses using the cell's own machinery. As a result, these methods of RNA silencing are highly regulatable.

[0377] The dual functional oligonucleotide tethers (“tethers”) of the invention are designed such that they recruit miRNAs (e.g., endogenous cellular miRNAs) to a target mRNA so as to induce the modulation of a gene of interest. In certain embodiments, the tethers have the formula T-L-μ, wherein T is an mRNA targeting moiety, L is a linking moiety, and is a miRNA recruiting moiety. Any one or more moiety may be double stranded. In certain embodiments, each moiety is single stranded.

[0378] Moieties within the tethers can be arranged or linked (in the 5′ to 3′ direction) as depicted in the formula T-L-μ (i.e., the 3′ end of the targeting moiety linked to the 5′ end of the linking moiety and the 3′ end of the linking moiety linked to the 5′ end of the miRNA recruiting moiety). Alternatively, the moieties can be arranged or linked in the tether as follows: μ-T-L (i.e., the 3′ end of the miRNA recruiting moiety linked to the 5′ end of the linking moiety and the 3′ end of the linking moiety linked to the 5′ end of the targeting moiety).

[0379] The mRNA targeting moiety, as described above, is capable of capturing a specific target mRNA. According to the invention, expression of the target mRNA is undesirable, and, thus, translational repression of the mRNA is desired. The mRNA targeting moiety should be of sufficient size to effectively bind the target mRNA. The length of the targeting moiety will vary greatly, depending, in part, on the length of the target mRNA and the degree of complementarity between the target mRNA and the targeting moiety. In various embodiments, the targeting moiety is less than about 200, 100, 50, 30, 25, 20, 19, 18, 17, 16, 15, 14, 13, 12, 11, 10, 9, 8, 7, 6, or 5 nucleotides in length. In a certain embodiment, the targeting moiety is about 15 to about 25 nucleotides in length.

[0380] The miRNA recruiting moiety, as described above, is capable of associating with a miRNA. According to the present application, the miRNA may be any miRNA capable of repressing the target mRNA. Mammals are reported to have over 250 endogenous miRNAs (Lagos-Quintana et al. (2002) Current Biol. 12:735-739; Lagos-Quintana et al. (2001) Science 294:858-862; and Lim et al. (2003) Science 299:1540). In various embodiments, the miRNA may be any art-recognized miRNA.

[0381] The linking moiety is any agent capable of linking the targeting moieties such that the activity of the targeting moieties is maintained. Linking moieties can be oligonucleotide moieties comprising a sufficient number of nucleotides, such that the targeting agents can sufficiently interact with their respective targets. Linking moieties have little or no sequence homology with cellular mRNA or miRNA sequences. Exemplary linking moieties include one or more 2′-O-methylnucleotides, e.g., 2′-β-methyladenosine, 2′-O-methylthymidine, 2′-O-methylguanosine or 2′-O-methyluridine.

[0382] e) Gene Silencing Oligonucleotides

[0383] In certain exemplary embodiments, gene expression (i.e., SARS-CoV-2 gene expression) can be modulated using oligonucleotide-based compounds comprising two or more single stranded antisense oligonucleotides that are linked through their 5′-ends that allow the presence of two or more accessible 3′-ends to effectively inhibit or decrease SARS-CoV-2 gene expression. Such linked oligonucleotides are also known as Gene Silencing Oligonucleotides (GSOs). (See, e.g., U.S. Pat. No. 8,431,544 assigned to Idera Pharmaceuticals, Inc., incorporated herein by reference in its entirety for all purposes.)

[0384] The linkage at the 5′ ends of the GSOs is independent of the other oligonucleotide linkages and may be directly via 5′, 3′ or 2′ hydroxyl groups, or indirectly, via a non-nucleotide linker or a nucleoside, utilizing either the 2′ or 3′ hydroxyl positions of the nucleoside. Linkages may also utilize a functionalized sugar or nucleobase of a 5′ terminal nucleotide.

[0385] GSOs can comprise two identical or different sequences conjugated at their 5′-5′ ends via a phosphodiester, phosphorothioate or non-nucleoside linker. Such compounds may comprise 15 to 27 nucleotides that are complementary to specific portions of mRNA targets of interest for antisense down regulation of a gene product. GSOs that comprise identical sequences can bind to a specific mRNA via Watson-Crick hydrogen bonding interactions and inhibit protein expression. GSOs that comprise different sequences are able to bind to two or more different regions of one or more mRNA target and inhibit protein expression. Such compounds are comprised of heteronucleotide sequences complementary to target mRNA and form stable duplex structures through Watson-Crick hydrogen bonding. Under certain conditions, GSOs containing two free 3′-ends (5′-5′-attached antisense) can be more potent inhibitors of gene expression than those containing a single free 3′-end or no free 3′-end.

[0386] In some embodiments, the non-nucleotide linker is glycerol or a glycerol homolog of the formula HO—(CH₂)ₒ—CH(OH)—(CH₂)ₚ—OH, wherein o and p independently are integers from 1 to about 6, from 1 to about 4 or from 1 to about 3. In some other embodiments, the non-nucleotide linker is a derivative of 1,3-diamino-2-hydroxypropane. Some such derivatives have the formula HO—(CH₂)ₘ—C(O)NH—CH₂—CH(OH)—CH₂—NHC(O)—(CH₂)ₘ—OH, wherein m is an integer from 0 to about 10, from 0 to about 6, from 2 to about 6 or from 2 to about 4.

[0387] Some non-nucleotide linkers permit attachment of more than two GSO components. For example, the non-nucleotide linker glycerol has three hydroxyl groups to which GSO components may be covalently attached. Some oligonucleotide-based compounds of the invention, therefore, comprise two or more oligonucleotides linked to a nucleotide or a non-nucleotide linker. Such oligonucleotides according to the invention are referred to as being “branched.”

[0388] In certain embodiments, GSOs are at least 14 nucleotides in length. In certain exemplary embodiments, GSOs are 15 to 40 nucleotides long or 20 to 30 nucleotides in length. Thus, the component oligonucleotides of GSOs can independently be 14, 15, 16, 17, 18, 19, 20, 21, 22, 23, 24, 25, 26, 27, 28, 29, 30, 31, 32, 33, 34, 35, 36, 37, 38, 39 or 40 nucleotides in length.

[0389] These oligonucleotides can be prepared by the art recognized methods, such as phosphoramidate or H-phosphonate chemistry, which can be carried out manually or by an automated synthesizer. These oligonucleotides may also be modified in a number of ways without compromising their ability to hybridize to mRNA. Such modifications may include at least one internucleotide linkage of the oligonucleotide being an alkylphosphonate, phosphorothioate, phosphorodithioate, methylphosphonate, phosphate ester, alkylphosphonothioate, phosphoramidate, carbamate, carbonate, phosphate hydroxyl, acetamidate, carboxymethyl ester, or a combination of these and other internucleotide linkages between the 5′ end of one nucleotide and the 3′ end of another nucleotide, in which the 5′ nucleotide phosphodiester linkage has been replaced with any number of chemical groups.

[0390] V. Modified Anti-SARS-CoV-2 RNA Silencing Agents

[0391] In certain aspects of the invention, an RNA silencing agent (or any portion thereof) of the present application, as described supra, may be modified, such that the activity of the agent is further improved. For example, the RNA silencing agents described in Section II supra, may be modified with any of the modifications described infra. The modifications can, in part, serve to further enhance target discrimination, to enhance stability of the agent (e.g., to prevent degradation), to promote cellular uptake, to enhance the target efficiency, to improve efficacy in binding (e.g., to the targets), to improve patient tolerance to the agent, and/or to reduce toxicity.

[0392] 1) Modifications to Enhance Target Discrimination

[0393] In certain embodiments, the RNA silencing agents of the present application may be substituted with a destabilizing nucleotide to enhance single nucleotide target discrimination (see U.S. application Ser. No. 11/698,689, filed Jan. 25, 2007 and U.S. Provisional Application No. 60/762,225 filed Jan. 25, 2006, both of which are incorporated herein by reference). Such a modification may be sufficient to abolish the specificity of the RNA silencing agent for a non-target mRNA (e.g. wild-type mRNA), without appreciably affecting the specificity of the RNA silencing agent for a target mRNA (e.g. gain-of-function mutant mRNA).

[0394] In certain embodiments, the RNA silencing agents of the present application are modified by the introduction of at least one universal nucleotide in the antisense strand thereof. Universal nucleotides comprise base portions that are capable of base pairing indiscriminately with any of the four conventional nucleotide bases (e.g. A, G, C, U). A universal nucleotide is contemplated because it has relatively minor effect on the stability of the RNA duplex or the duplex formed by the guide strand of the RNA silencing agent and the target mRNA. Exemplary universal nucleotides include those having an inosine base portion or an inosine analog base portion selected from the group consisting of deoxyinosine (e.g. 2′-deoxyinosine), 7-deaza-2′-deoxyinosine, 2′-aza-2′-deoxyinosine, PNA-inosine, morpholino-inosine, LNA-inosine, phosphoramidate-inosine, 2′-O-methoxyethyl-inosine, and 2′-OMe-inosine. In certain embodiments, the universal nucleotide is an inosine residue or a naturally occurring analog thereof.

[0395] In certain embodiments, the RNA silencing agents of the invention are modified by the introduction of at least one destabilizing nucleotide within 5 nucleotides from a specificity-determining nucleotide (i.e., the nucleotide which recognizes the disease-related polymorphism). For example, the destabilizing nucleotide may be introduced at a position that is within 5, 4, 3, 2, or 1 nucleotide(s) from a specificity-determining nucleotide. In exemplary embodiments, the destabilizing nucleotide is introduced at a position which is 3 nucleotides from the specificity-determining nucleotide (i.e., such that there are 2 stabilizing nucleotides between the destabilizing nucleotide and the specificity-determining nucleotide). In RNA silencing agents having two strands or strand portions (e.g. siRNAs and shRNAs), the destabilizing nucleotide may be introduced in the strand or strand portion that does not contain the specificity-determining nucleotide. In certain embodiments, the destabilizing nucleotide is introduced in the same strand or strand portion that contains the specificity-determining nucleotide.

[0396] 2) Modifications to Enhance Efficacy and Specificity

[0397] In certain embodiments, the RNA silencing agents of the invention may be altered to facilitate enhanced efficacy and specificity in mediating RNAi according to asymmetry design rules (see U.S. Pat. Nos. 8,309,704, 7,750,144, 8,304,530, 8,329,892 and 8,309,705). Such alterations facilitate entry of the antisense strand of the siRNA (e.g., a siRNA designed using the methods of the present application or an siRNA produced from a shRNA) into RISC in favor of the sense strand, such that the antisense strand preferentially guides cleavage or translational repression of a target mRNA, and thus increasing or improving the efficiency of target cleavage and silencing. In certain embodiments, the asymmetry of an RNA silencing agent is enhanced by lessening the base pair strength between the antisense strand 5′ end (AS 5′) and the sense strand 3′ end (S 3′) of the RNA silencing agent relative to the bond strength or base pair strength between the antisense strand 3′ end (AS 3′) and the sense strand 5′ end (S ′5) of said RNA silencing agent.

[0398] In one embodiment, the asymmetry of an RNA silencing agent of the present application may be enhanced such that there are fewer G:C base pairs between the 5′ end of the first or antisense strand and the 3′ end of the sense strand portion than between the 3′ end of the first or antisense strand and the 5′ end of the sense strand portion. In another embodiment, the asymmetry of an RNA silencing agent of the invention may be enhanced such that there is at least one mismatched base pair between the 5′ end of the first or antisense strand and the 3′ end of the sense strand portion. In certain embodiments, the mismatched base pair is selected from the group consisting of G:A, C:A, C:U, G:G, A:A, C:C and U:U. In another embodiment, the asymmetry of an RNA silencing agent of the invention may be enhanced such that there is at least one wobble base pair, e.g., G:U, between the 5′ end of the first or antisense strand and the 3′ end of the sense strand portion. In another embodiment, the asymmetry of an RNA silencing agent of the invention may be enhanced such that there is at least one base pair comprising a rare nucleotide, e.g., inosine (I). In certain embodiments, the base pair is selected from the group consisting of an I:A, I:U and I:C. In yet another embodiment, the asymmetry of an RNA silencing agent of the invention may be enhanced such that there is at least one base pair comprising a modified nucleotide. In certain embodiments, the modified nucleotide is selected from the group consisting of 2-amino-G, 2-amino-A, 2,6-diamino-G, and 2,6-diamino-A.

[0399] 3) RNA Silencing Agents with Enhanced Stability

[0400] The RNA silencing agents of the present application can be modified to improve stability in serum or in growth medium for cell cultures. In order to enhance the stability, the 3′-residues may be stabilized against degradation, e.g., they may be selected such that they consist of purine nucleotides, such as adenosine or guanosine nucleotides. Alternatively, substitution of pyrimidine nucleotides by modified analogues, e.g., substitution of uridine by 2′-deoxythymidine is tolerated and does not affect the efficiency of RNA interference.

[0401] In a one aspect, the present application features RNA silencing agents that include first and second strands wherein the second strand and/or first strand is modified by the substitution of internal nucleotides with modified nucleotides, such that in vivo stability is enhanced as compared to a corresponding unmodified RNA silencing agent. As defined herein, an “internal” nucleotide is one occurring at any position other than the 5′ end or 3′ end of nucleic acid molecule, polynucleotide or oligonucleotide. An internal nucleotide can be within a single-stranded molecule or within a strand of a duplex or double-stranded molecule. In one embodiment, the sense strand and/or antisense strand is modified by the substitution of at least one internal nucleotide. In another embodiment, the sense strand and/or antisense strand is modified by the substitution of at least 2, 3, 4, 5, 6, 7, 8, 9, 10, 11, 12, 13, 14, 15, 16, 17, 18, 19, 20, 21, 22, 23, 24, 25 or more internal nucleotides. In another embodiment, the sense strand and/or antisense strand is modified by the substitution of at least 5%, 10%, 15%, 20%, 25%, 30%, 35%, 40%, 45%, 50%, 55%, 60%, 65%, 70%, 75%, 80%, 85%, 90%, 95% or more of the internal nucleotides. In yet another embodiment, the sense strand and/or antisense strand is modified by the substitution of all of the internal nucleotides.

[0402] In one aspect, the present application features RNA silencing agents that are at least 80% chemically modified. In certain embodiments, the RNA silencing agents may be fully chemically modified, i.e., 100% of the nucleotides are chemically modified. In another aspect, the present application features RNA silencing agents comprising 2′-OH ribose groups that are at least 80% chemically modified. In certain embodiments, the RNA silencing agents comprise 2′-OH ribose groups that are about 80%, 85%, 90%, 95%, or 100% chemically modified.

[0403] In certain embodiments, the RNA silencing agents may contain at least one modified nucleotide analogue. The nucleotide analogues may be located at positions where the target-specific silencing activity, e.g., the RNAi mediating activity or translational repression activity is not substantially affected, e.g., in a region at the 5′-end and/or the 3′-end of the siRNA molecule. Moreover, the ends may be stabilized by incorporating modified nucleotide analogues.

[0404] Exemplary nucleotide analogues include sugar- and/or backbone-modified ribonucleotides (i.e., include modifications to the phosphate-sugar backbone). For example, the phosphodiester linkages of natural RNA may be modified to include at least one of a nitrogen or sulfur heteroatom. In exemplary backbone-modified ribonucleotides, the phosphoester group connecting to adjacent ribonucleotides is replaced by a modified group, e.g., of phosphorothioate group. In exemplary sugar-modified ribonucleotides, the 2′ OH-group is replaced by a group selected from H, OR, R, halo, SH, SR, NH₂, NHR, NR₂ or ON, wherein R is C₁-C₆ alkyl, alkenyl or alkynyl and halo is F, Cl, Br or I.

[0405] In certain embodiments, the modifications are 2′-fluoro, 2′-amino and/or 2′-thio modifications. Modifications include 2′-fluoro-cytidine, 2′-fluoro-uridine, 2′-fluoro-adenosine, 2′-fluoro-guanosine, 2-amino-cytidine, 2-amino-uridine, 2-amino-adenosine, 2′-amino-guanosine, 2,6-diaminopurine, 4-thio-uridine, and/or 5-amino-allyl-uridine. In a certain embodiment, the 2′-fluoro ribonucleotides are every uridine and cytidine. Additional exemplary modifications include 5-bromo-uridine, 5-iodo-uridine, 5-methyl-cytidine, ribothymidine, 2-aminopurine, 2′-amino-butyryl-pyrene-uridine, 5-fluoro-cytidine, and 5-fluoro-uridine. 2′-deoxy-nucleotides and 2′-O-Me nucleotides can also be used within modified RNA-silencing agents of the instant invention. Additional modified residues include, deoxy-abasic, inosine, N3-methyl-uridine, N6,N6-dimethyl-adenosine, pseudouridine, purine ribonucleoside and ribavirin. In a certain embodiment, the 2′ moiety is a methyl group such that the linking moiety is a 2′-O-methyl oligonucleotide.

[0406] In a certain embodiment, the RNA silencing agent of the present application comprises Locked Nucleic Acids (LNAs). LNAs comprise sugar-modified nucleotides that resist nuclease activities (are highly stable) and possess single nucleotide discrimination for mRNA (Elmen et al., Nucleic Acids Res., (2005), 33(1): 439-447; Braasch et al. (2003) Biochemistry 42:7967-7975, Petersen et al. (2003) Trends Biotechnol 21:74-81). These molecules have 2′-0,4′-C-ethylene-bridged nucleic acids, with possible modifications such as 2′-deoxy-2″-fluorouridine. Moreover, LNAs increase the specificity of oligonucleotides by constraining the sugar moiety into the 3′-endo conformation, thereby pre-organizing the nucleotide for base pairing and increasing the melting temperature of the oligonucleotide by as much as 10° C. per base.

[0407] In another exemplary embodiment, the RNA silencing agent of the present application comprises Peptide Nucleic Acids (PNAs). PNAs comprise modified nucleotides in which the sugar-phosphate portion of the nucleotide is replaced with a neutral 2-amino ethylglycine moiety capable of forming a polyamide backbone, which is highly resistant to nuclease digestion and imparts improved binding specificity to the molecule (Nielsen, et al., Science, (2001), 254: 1497-1500).

[0408] Also contemplated are nucleobase-modified ribonucleotides, i.e., ribonucleotides, containing at least one non-naturally occurring nucleobase instead of a naturally occurring nucleobase. Bases may be modified to block the activity of adenosine deaminase. Exemplary modified nucleobases include, but are not limited to, uridine and/or cytidine modified at the 5-position, e.g., 5-(2-amino)propyl uridine, 5-bromo uridine; adenosine and/or guanosines modified at the 8 position, e.g., 8-bromo guanosine; deaza nucleotides, e.g., 7-deaza-adenosine; O- and N-alkylated nucleotides, e.g., N6-methyl adenosine are suitable. It should be noted that the above modifications may be combined.

[0409] In other embodiments, cross-linking can be employed to alter the pharmacokinetics of the RNA silencing agent, for example, to increase half-life in the body. Thus, the present application includes RNA silencing agents having two complementary strands of nucleic acid, wherein the two strands are crosslinked. The present application also includes RNA silencing agents which are conjugated or unconjugated (e.g., at its 3′ terminus) to another moiety (e.g. a non-nucleic acid moiety such as a peptide), an organic compound (e.g., a dye), or the like). Modifying siRNA derivatives in this way may improve cellular uptake or enhance cellular targeting activities of the resulting siRNA derivative as compared to the corresponding siRNA, are useful for tracing the siRNA derivative in the cell, or improve the stability of the siRNA derivative compared to the corresponding siRNA.

[0410] Other exemplary modifications include: (a) 2′ modification, e.g., provision of a 2′ OMe moiety on a U in a sense or antisense strand, but especially on a sense strand, or provision of a 2′ OMe moiety in a 3′ overhang, e.g., at the 3′ terminus (3′ terminus means at the 3′ atom of the molecule or at the most 3′ moiety, e.g., the most 3′ P or 2′ position, as indicated by the context); (b) modification of the backbone, e.g., with the replacement of an O with an S, in the phosphate backbone, e.g., the provision of a phosphorothioate modification, on the U or the A or both, especially on an antisense strand; e.g., with the replacement of a O with an S; (c) replacement of the U with a C₅ amino linker; (d) replacement of an A with a G (sequence changes can be located on the sense strand and not the antisense strand in certain embodiments); and (d) modification at the 2′, 6′, 7′, or 8′ position. Exemplary embodiments are those in which one or more of these modifications are present on the sense but not the antisense strand, or embodiments where the antisense strand has fewer of such modifications. Yet other exemplary modifications include the use of a methylated P in a 3′ overhang, e.g., at the 3′ terminus; combination of a 2′ modification, e.g., provision of a 2′ O Me moiety and modification of the backbone, e.g., with the replacement of a O with an S, e.g., the provision of a phosphorothioate modification, or the use of a methylated P, in a 3′ overhang, e.g., at the 3′ terminus; modification with a 3′ alkyl; modification with an abasic pyrrolidone in a 3′ overhang, e.g., at the 3′ terminus; modification with naproxen, ibuprofen, or other moieties which inhibit degradation at the 3′ terminus.

[0411] Heavily Modified RNA Silencing Agents

[0412] In certain embodiments, the RNA silencing agent comprises at least 80% chemically modified nucleotides. In certain embodiments, the RNA silencing agent is fully chemically modified, i.e., 100% of the nucleotides are chemically modified.

[0413] In certain embodiments, the RNA silencing agent is 2′-O-methyl rich, i.e., comprises greater than 50% 2′-O-methyl content. In certain embodiments, the RNA silencing agent comprises at least about 55%, 60%, 65%, 70%, 75%, 80%, 85%, 90%, 95%, or 100% 2′-O-methyl nucleotide content. In certain embodiments, the RNA silencing agent comprises at least about 70% 2′-O-methyl nucleotide modifications. In certain embodiments, the RNA silencing agent comprises between about 70% and about 90% 2′-O-methyl nucleotide modifications. In certain embodiments, the RNA silencing agent is a dsRNA comprising an antisense strand and sense strand. In certain embodiments, the antisense strand comprises at least about 70% 2′-O-methyl nucleotide modifications. In certain embodiments, the antisense strand comprises between about 70% and about 90% 2′-O-methyl nucleotide modifications. In certain embodiments, the sense strand comprises at least about 70% 2′-O-methyl nucleotide modifications. In certain embodiments, the sense strand comprises between about 70% and about 90% 2′-O-methyl nucleotide modifications. In certain embodiments, the sense strand comprises between 100% 2′-O-methyl nucleotide modifications.

[0414] 2′-O-methyl rich RNA silencing agents and specific chemical modification patterns are further described in U.S. Ser. No. 16/550,076 (filed Aug. 23, 2019) and U.S. Ser. No. 62/891,185 (filed Aug. 23, 2019), each of which is incorporated herein by reference.

[0415] Internucleotide Linkage Modifications

[0416] In certain embodiments, at least one internucleotide linkage, intersubunit linkage, or nucleotide backbone is modified in the RNA silencing agent. In certain embodiments, all of the internucleotide linkages in the RNA silencing agent are modified. In certain embodiments, the modified internucleotide linkage comprises a phosphorothioate internucleotide linkage. In certain embodiments, the RNA silencing agent comprise 1, 2, 3, 4, 5, 6, 7, 8, 9, 10, 11, 12, 13, 14, 15, 16, 17, 18, 19, 20, 21, 22, 23, 24, or 25 phosphorothioate internucleotide linkages. In certain embodiments, the RNA silencing agent comprises 4-16 phosphorothioate internucleotide linkages. In certain embodiments, the RNA silencing agent comprises 8-13 phosphorothioate internucleotide linkages. In certain embodiments, the RNA silencing agent is a dsRNA comprising an antisense strand and a sense strand, each comprising a 5′ end and a 3′ end. In certain embodiments, the nucleotides at positions 1 and 2 from the 5′ end of sense strand are connected to adjacent ribonucleotides via phosphorothioate internucleotide linkages. In certain embodiments, the nucleotides at positions 1 and 2 from the 3′ end of sense strand are connected to adjacent ribonucleotides via phosphorothioate internucleotide linkages. In certain embodiments, the nucleotides at positions 1 and 2 from the 5′ end of antisense strand are connected to adjacent ribonucleotides via phosphorothioate internucleotide linkages. In certain embodiments, the nucleotides at positions 1-2 to 1-8 from the 3′ end of antisense strand are connected to adjacent ribonucleotides via phosphorothioate internucleotide linkages. In certain embodiments, the nucleotides at positions 1-2, 1-3, 1-4, 1-5, 1-6, 1-7, or 1-8 from the 3′ end of antisense strand are connected to adjacent ribonucleotides via phosphorothioate internucleotide linkages. In certain embodiments, the nucleotides at positions 1-2 to 1-7 from the 3′ end of antisense strand are connected to adjacent ribonucleotides via phosphorothioate internucleotide linkages.

[0417] In one aspect, the disclosure provides a modified oligonucleotide, said oligonucleotide having a 5′ end, a 3′ end, that is complementary to a target, wherein the oligonucleotide comprises a sense and antisense strand, and at least one modified intersubunit linkage of Formula (I):

[chemical structure]

wherein:
B is a base pairing moiety;
W is selected from the group consisting of O, OCH₂, OCH, CH₂, and CH;
X is selected from the group consisting of halo, hydroxy, and C₁₋₆ alkoxy;
Y is selected from the group consisting of O—, OH, OR, NH—, NH₂, S—, and SH;
Z is selected from the group consisting of O and CH₂;
R is a protecting group; and [symbol]
is an optional double bond.

[0418] In an embodiment of Formula (I), when W is CH, [symbol] is a double bond.

[0419] In an embodiment of Formula (I), when W selected from the group consisting of O, OCH₂, OCH, CH₂, [symbol] is a single bond.

[0420] In an embodiment of Formula (I), when Y is O—, either Z or W is not O.

[0421] In an embodiment of Formula (I), Z is CH₂ and W is CH₂. In another embodiment, the modified intersubunit linkage of Formula (I) is a modified intersubunit linkage of Formula (II):

[chemical structure]

[0422] In an embodiment of Formula (I), Z is CH₂ and W is O. In another embodiment, wherein the modified intersubunit linkage of Formula (I) is a modified intersubunit linkage of Formula (III):

[chemical structure]

[0423] In an embodiment of Formula (I), Z is O and W is CH₂. In another embodiment, the modified intersubunit linkage of Formula (I) is a modified intersubunit linkage of Formula (IV):

[chemical structure]

[0424] In an embodiment of Formula (I), Z is O and W is CH. In another embodiment, the modified intersubunit linkage of Formula (I) is a modified intersubunit linkage of Formula V:

[chemical structure]

[0425] In an embodiment of Formula (I), Z is O and W is OCH₂. In another embodiment, the modified intersubunit linkage of Formula (I) is a modified intersubunit linkage of Formula VI:

[chemical structure]

[0426] In an embodiment of Formula (I), Z is CH₂ and W is CH. In another embodiment, the modified intersubunit linkage of Formula (I) is a modified intersubunit linkage of Formula VII:

[chemical structure]

[0427] In an embodiment of Formula (I), the base pairing moiety B is selected from the group consisting of adenine, guanine, cytosine, and uracil.

[0428] In an embodiment, the modified oligonucleotide is incorporated into siRNA, said modified siRNA having a 5′ end, a 3′ end, that is complementary to a target, wherein the siRNA comprises a sense and antisense strand, and at least one modified intersubunit linkage of any one or more of Formula (I), Formula (II), Formula (III), Formula (IV), Formula (V), Formula (VI), or Formula (VII).

[0429] In an embodiment, the modified oligonucleotide is incorporated into siRNA, said modified siRNA having a 5′ end, a 3′ end, that is complementary to a target and comprises a sense and antisense strand, wherein the siRNA comprises at least one modified intersubunit linkage is of Formula VIII:

[chemical structure]

wherein:

[0430] D is selected from the group consisting of O, OCH₂, OCH, CH₂, and CH;

[0431] C is selected from the group consisting of O—, OH, OR¹. NH—, NH₂, S—, and SH;

[0432] A is selected from the group consisting of O and CH₂;

R¹ is a protecting group; [symbol]
is an optional double bond; and
the intersubunit is bridging two optionally modified nucleosides.

[0433] In an embodiment, when C is O—, either A or D is not O.

[0434] In an embodiment, D is CH₂. In another embodiment, the modified intersubunit linkage of Formula VIII is a modified intersubunit linkage of Formula (IX):

[chemical structure]

[0435] In an embodiment, D is O. In another embodiment, the modified intersubunit linkage of Formula VIII is a modified intersubunit linkage of Formula (X):

[chemical structure]

[0436] In an embodiment, D is CH₂. In another embodiment, the modified intersubunit linkage of Formula (VIII) is a modified intersubunit linkage of Formula (XI):

[chemical structure]

[0437] In an embodiment, D is CH. In another embodiment, the modified intersubunit linkage of Formula VIII is a modified intersubunit linkage of Formula (XII):

[chemical structure]

[0438] In another embodiment, the modified intersubunit linkage of Formula (VII) is a modified intersubunit linkage of Formula (XIV):

[chemical structure]

[0439] In an embodiment, D is OCH₂. In another embodiment, the modified intersubunit linkage of Formula (VII) is a modified intersubunit linkage of Formula (XIII):

[chemical structure]

[0440] In another embodiment, the modified intersubunit linkage of Formula (VII) is a modified intersubunit linkage of Formula (XXa):

[chemical structure]

[0441] In an embodiment of the modified siRNA linkage, each optionally modified nucleoside is independently, at each occurrence, selected from the group consisting of adenosine, guanosine, cytidine, and uridine.

[0442] In certain exemplary embodiments of Formula (I), W is O. In another embodiment, W is CH₂. In yet another embodiment, W is CH.

[0443] In certain exemplary embodiments of Formula (I), X is OH. In another embodiment, X is OCH₃. In yet another embodiment, X is halo.

[0444] In a certain embodiment of Formula (I), the modified siRNA does not comprise a 2′-fluoro substituent.

[0445] In an embodiment of Formula (I), Y is O. In another embodiment, Y is OH. In yet another embodiment, Y is OR. In still another embodiment, Y is NH—. In an embodiment, Y is NH₂. In another embodiment, Y is S—. In yet another embodiment, Y is SH.

[0446] In an embodiment of Formula (I), Z is O. In another embodiment, Z is CH₂.

[0447] In an embodiment, the modified intersubunit linkage is inserted on position 1-2 of the antisense strand. In another embodiment, the modified intersubunit linkage is inserted on position 6-7 of the antisense strand. In yet another embodiment, the modified intersubunit linkage is inserted on position 10-11 of the antisense strand. In still another embodiment, the modified intersubunit linkage is inserted on position 19-20 of the antisense strand. In an embodiment, the modified intersubunit linkage is inserted on positions 5-6 and 18-19 of the antisense strand.

[0448] In an exemplary embodiment of the modified siRNA linkage of Formula (VIII), C is O—. In another embodiment, C is OH. In yet another embodiment, C is OR¹. In still another embodiment, C is NH—. In an embodiment, C is NH₂. In another embodiment, C is S—. In yet another embodiment, C is SH.

[0449] In an exemplary embodiment of the modified siRNA linkage of Formula (VIII), A is O. In another embodiment, A is CH₂. In yet another embodiment, C is OR¹. In still another embodiment, C is NH—. In an embodiment, C is NH₂. In another embodiment, C is S—. In yet another embodiment, C is SH.

[0450] In a certain embodiment of the modified siRNA linkage of Formula (VIII), the optionally modified nucleoside is adenosine. In another embodiment of the modified siRNA linkage of Formula (VIII), the optionally modified nucleoside is guanosine. In another embodiment of the modified siRNA linkage of Formula (VIII), the optionally modified nucleoside is cytidine. In another embodiment of the modified siRNA linkage of Formula (VIII), the optionally modified nucleoside is uridine.

[0451] In an embodiment of the modified siRNA linkage, wherein the linkage is inserted on position 1-2 of the antisense strand. In another embodiment, the linkage is inserted on position 6-7 of the antisense strand. In yet another embodiment, the linkage is inserted on position 10-11 of the antisense strand. In still another embodiment, the linkage is inserted on position 19-20 of the antisense strand. In an embodiment, the linkage is inserted on positions 5-6 and 18-19 of the antisense strand.

[0452] In certain embodiments of Formula (I), the base pairing moiety B is adenine. In certain embodiments of Formula (I), the base pairing moiety B is guanine. In certain embodiments of Formula (I), the base pairing moiety B is cytosine. In certain embodiments of Formula (I), the base pairing moiety B is uracil.

[0453] In an embodiment of Formula (I), W is O. In an embodiment of Formula (I), W is CH₂. In an embodiment of Formula (I), W is CH.

[0454] In an embodiment of Formula (I), X is OH. In an embodiment of Formula (I), X is OCH₃. In an embodiment of Formula (I), X is halo.

[0455] In an exemplary embodiment of Formula (I), the modified oligonucleotide does not comprise a 2′-fluoro substituent.

[0456] In an embodiment of Formula (I), Y is O—. In an embodiment of Formula (I), Y is OH. In an embodiment of Formula (I), Y is OR. In an embodiment of Formula (I), Y is NH—. In an embodiment of Formula (I), Y is NH₂. In an embodiment of Formula (I), Y is S—. In an embodiment of Formula (I), Y is SH.

[0457] In an embodiment of Formula (I), Z is O. In an embodiment of Formula (I), Z is CH₂.

[0458] In an embodiment of the Formula (I), the linkage is inserted on position 1-2 of the antisense strand. In another embodiment of Formula (I), the linkage is inserted on position 6-7 of the antisense strand. In yet another embodiment of Formula (I), the linkage is inserted on position 10-11 of the antisense strand. In still another embodiment of Formula (I), the linkage is inserted on position 19-20 of the antisense strand. In an embodiment of Formula (I), the linkage is inserted on positions 5-6 and 18-19 of the antisense strand.

[0459] Modified intersubunit linkages are further described in WO20200198509 and PCT/US2021/024425, each of which is incorporated herein by reference.

[0460] 4) Conjugated Functional Moieties

[0461] In other embodiments, RNA silencing agents may be modified with one or more functional moieties. A functional moiety is a molecule that confers one or more additional activities to the RNA silencing agent. In certain embodiments, the functional moieties enhance cellular uptake by target cells (e.g., lung cells). Thus, the invention includes RNA silencing agents which are conjugated or unconjugated (e.g., at its 5′ and/or 3′ terminus) to another moiety (e.g. a non-nucleic acid moiety such as a peptide), an organic compound (e.g., a dye), or the like. The conjugation can be accomplished by methods known in the art, e.g., using the methods of Lambert et al., Drug Deliv. Rev.: 47(1), 99-112 (2001) (describes nucleic acids loaded to polyalkylcyanoacrylate (PACA) nanoparticles); Fattal et al., J. Control Release 53 (1-3): 137-43 (1998) (describes nucleic acids bound to nanoparticles); Schwab et al., Ann. Oncol. 5 Suppl. 4:55-8 (1994) (describes nucleic acids linked to intercalating agents, hydrophobic groups, polycations or PACA nanoparticles); and Godard et al., Eur. J. Biochem. 232(2):404-10 (1995) (describes nucleic acids linked to nanoparticles).

[0462] In a certain embodiment, the functional moiety is a hydrophobic moiety. In a certain embodiment, the hydrophobic moiety is selected from the group consisting of fatty acids, steroids, secosteroids, lipids, gangliosides and nucleoside analogs, endocannabinoids, and vitamins. In a certain embodiment, the steroid selected from the group consisting of cholesterol and Lithocholic acid (LCA). In a certain embodiment, the fatty acid selected from the group consisting of Eicosapentaenoic acid (EPA), Docosahexaenoic acid (DHA) and Docosanoic acid (DCA). In a certain embodiment, the vitamin selected from the group consisting of choline, vitamin A, vitamin E, and derivatives or metabolites thereof. In a certain embodiment, the vitamin is selected from the group consisting of retinoic acid and alpha-tocopheryl succinate.

[0463] In a certain embodiment, an RNA silencing agent of invention is conjugated to a lipophilic moiety. In one embodiment, the lipophilic moiety is a ligand that includes a cationic group. In another embodiment, the lipophilic moiety is attached to one or both strands of an siRNA. In an exemplary embodiment, the lipophilic moiety is attached to one end of the sense strand of the siRNA. In another exemplary embodiment, the lipophilic moiety is attached to the 3′ end of the sense strand. In certain embodiments, the lipophilic moiety is selected from the group consisting of cholesterol, vitamin E, vitamin K, vitamin A, folic acid, a cationic dye (e.g., Cy3). In an exemplary embodiment, the lipophilic moiety is cholesterol. Other lipophilic moieties include cholic acid, adamantane acetic acid, 1-pyrene butyric acid, dihydrotestosterone, 1,3-Bis-O(hexadecyl)glycerol, geranyloxyhexyl group, hexadecylglycerol, bomeol, menthol, 1,3-propanediol, heptadecyl group, palmitic acid, myristic acid, O3-(oleoyl)lithocholic acid, O3-(oleoyl)cholenic acid, dimethoxytrityl, or phenoxazine.

[0464] In certain embodiments, the functional moieties may comprise one or more ligands tethered to an RNA silencing agent to improve stability, hybridization thermodynamics with a target nucleic acid, targeting to a particular tissue or cell-type, or cell permeability, e.g., by an endocytosis-dependent or -independent mechanism. Ligands and associated modifications can also increase sequence specificity and consequently decrease off-site targeting. A tethered ligand can include one or more modified bases or sugars that can function as intercalators. These can be located in an internal region, such as in a bulge of RNA silencing agent/target duplex. The intercalator can be an aromatic, e.g., a polycyclic aromatic or heterocyclic aromatic compound. A polycyclic intercalator can have stacking capabilities, and can include systems with 2, 3, or 4 fused rings. The universal bases described herein can be included on a ligand. In one embodiment, the ligand can include a cleaving group that contributes to target gene inhibition by cleavage of the target nucleic acid. The cleaving group can be, for example, a bleomycin (e.g., bleomycin-A5, bleomycin-A2, or bleomycin-B2), pyrene, phenanthroline (e.g., 0-phenanthroline), a polyamine, a tripeptide (e.g., lys-tyr-lys tripeptide), or a metal ion chelating group. The metal ion chelating group can include, e.g., an Lu(III) or EU(III) macrocyclic complex, a Zn(II) 2,9-dimethylphenanthroline derivative, a Cu(II) terpyridine, or acridine, which can promote the selective cleavage of target RNA at the site of the bulge by free metal ions, such as Lu(III). In some embodiments, a peptide ligand can be tethered to a RNA silencing agent to promote cleavage of the target RNA, e.g., at the bulge region. For example, 1,8-dimethyl-1,3,6,8,10,13-hexaazacyclotetradecane (cyclam) can be conjugated to a peptide (e.g., by an amino acid derivative) to promote target RNA cleavage. A tethered ligand can be an aminoglycoside ligand, which can cause an RNA silencing agent to have improved hybridization properties or improved sequence specificity. Exemplary aminoglycosides include glycosylated polylysine, galactosylated polylysine, neomycin B, tobramycin, kanamycin A, and acridine conjugates of aminoglycosides, such as Neo-N-acridine, Neo-S-acridine, Neo-C-acridine, Tobra-N-acridine, and KanaA-N-acridine. Use of an acridine analog can increase sequence specificity. For example, neomycin B has a high affinity for RNA as compared to DNA, but low sequence-specificity. An acridine analog, neo-5-acridine, has an increased affinity for the HIV Rev-response element (RRE). In some embodiments, the guanidine analog (the guanidinoglycoside) of an aminoglycoside ligand is tethered to an RNA silencing agent. In a guanidinoglycoside, the amine group on the amino acid is exchanged for a guanidine group. Attachment of a guanidine analog can enhance cell permeability of an RNA silencing agent. A tethered ligand can be a poly-arginine peptide, peptoid or peptidomimetic, which can enhance the cellular uptake of an oligonucleotide agent.

[0465] Exemplary ligands are coupled, either directly or indirectly, via an intervening tether, to a ligand-conjugated carrier. In certain embodiments, the coupling is through a covalent bond. In certain embodiments, the ligand is attached to the carrier via an intervening tether. In certain embodiments, a ligand alters the distribution, targeting or lifetime of an RNA silencing agent into which it is incorporated. In certain embodiments, a ligand provides an enhanced affinity for a selected target, e.g., molecule, cell or cell type, compartment, e.g., a cellular or organ compartment, tissue, organ or region of the body, as, e.g., compared to a species absent such a ligand.

[0466] Exemplary ligands can improve transport, hybridization, and specificity properties and may also improve nuclease resistance of the resultant natural or modified RNA silencing agent, or a polymeric molecule comprising any combination of monomers described herein and/or natural or modified ribonucleotides. Ligands in general can include therapeutic modifiers, e.g., for enhancing uptake; diagnostic compounds or reporter groups e.g., for monitoring distribution; cross-linking agents; nuclease-resistance conferring moieties; and natural or unusual nucleobases. General examples include lipophiles, lipids, steroids (e.g., uvaol, hecigenin, diosgenin), terpenes (e.g., triterpenes, e.g., sarsasapogenin, Friedelin, epifriedelanol derivatized lithocholic acid), vitamins (e.g., folic acid, vitamin A, biotin, pyridoxal), carbohydrates, proteins, protein binding agents, integrin targeting molecules, polycationics, peptides, polyamines, and peptide mimics. Ligands can include a naturally occurring substance, (e.g., human serum albumin (HSA), low-density lipoprotein (LDL), or globulin); carbohydrate (e.g., a dextran, pullulan, chitin, chitosan, inulin, cyclodextrin or hyaluronic acid); amino acid, or a lipid. The ligand may also be a recombinant or synthetic molecule, such as a synthetic polymer, e.g., a synthetic polyamino acid. Examples of polyamino acids include polyamino acid is a polylysine (PLL), poly L-aspartic acid, poly L-glutamic acid, styrene-maleic acid anhydride copolymer, poly(L-lactide-co-glycolied) copolymer, divinyl ether-maleic anhydride copolymer, N-(2-hydroxypropyl)methacrylamide copolymer (HMPA), polyethylene glycol (PEG), polyvinyl alcohol (PVA), polyurethane, poly(2-ethylacryllic acid), N-isopropylacrylamide polymers, or polyphosphazine. Example of polyamines include: polyethylenimine, polylysine (PLL), spermine, spermidine, polyamine, pseudopeptide-polyamine, peptidomimetic polyamine, dendrimer polyamine, arginine, amidine, protamine, cationic lipid, cationic porphyrin, quaternary salt of a polyamine, or an alpha helical peptide.

[0467] Ligands can also include targeting groups, e.g., a cell or tissue targeting agent, e.g., a lectin, glycoprotein, lipid or protein, e.g., an antibody, that binds to a specified cell type such as a kidney cell. A targeting group can be a thyrotropin, melanotropin, lectin, glycoprotein, surfactant protein A, mucin carbohydrate, multivalent lactose, multivalent galactose, N-acetyl-galactosamine (GalNAc) or derivatives thereof, N-acetyl-glucosamine, multivalent mannose, multivalent fucose, glycosylated polyaminoacids, multivalent galactose, transferrin, bisphosphonate, polyglutamate, polyaspartate, a lipid, cholesterol, a steroid, bile acid, folate, vitamin B12, biotin, or an RGD peptide or RGD peptide mimetic. Other examples of ligands include dyes, intercalating agents (e.g. acridines and substituted acridines), cross-linkers (e.g. psoralene, mitomycin C), porphyrins (TPPC4, texaphyrin, Sapphyrin), polycyclic aromatic hydrocarbons (e.g., phenazine, dihydrophenazine, phenanthroline, pyrenes), lys-tyr-lys tripeptide, aminoglycosides, guanidium aminoglycosides, artificial endonucleases (e.g. EDTA), lipophilic molecules, e.g, cholesterol (and thio analogs thereof), cholic acid, cholanic acid, lithocholic acid, adamantane acetic acid, 1-pyrene butyric acid, dihydrotestosterone, glycerol (e.g., esters (e.g., mono, bis, or tris fatty acid esters, e.g., C₁₀, C₁₁, C₁₂, C₁₃, C₁₄, C₁₅, C₁₆, C₁₇, Cis, C₁₉, or C₂₀ fatty acids) and ethers thereof, e.g., C₁₀, C₁₁, C₁₂, C₁₃, C₁₄, C₁₅, C₁₆, C₁₇, C₁₈, C₁₉, or C₂₀ alkyl; e.g., 1,3-bis-O(hexadecyl)glycerol, 1,3-bis-O(octaadecyl)glycerol), geranyloxyhexyl group, hexadecylglycerol, borneol, menthol, 1,3-propanediol, heptadecyl group, palmitic acid, stearic acid (e.g., glyceryl distearate), oleic acid, myristic acid, O3-(oleoyl)lithocholic acid, O3-(oleoyl)cholenic acid, dimethoxytrityl, or phenoxazine) and peptide conjugates (e.g., antennapedia peptide, Tat peptide), alkylating agents, phosphate, amino, mercapto, PEG (e.g., PEG-40K), MPEG, [MPEG]2, polyamino, alkyl, substituted alkyl, radiolabeled markers, enzymes, haptens (e.g. biotin), transport/absorption facilitators (e.g., aspirin, naproxen, vitamin E, folic acid), synthetic ribonucleases (e.g., imidazole, bisimidazole, histamine, imidazole clusters, acridine-imidazole conjugates, Eu³⁺ complexes of tetraazamacrocycles), dinitrophenyl, HRP or AP. In certain embodiments, the ligand is GalNAc or a derivative thereof.

[0468] Ligands can be proteins, e.g., glycoproteins, or peptides, e.g., molecules having a specific affinity for a co-ligand, or antibodies e.g., an antibody, that binds to a specified cell type such as a cancer cell, endothelial cell, or bone cell. Ligands may also include hormones and hormone receptors. They can also include non-peptidic species, such as lipids, lectins, carbohydrates, vitamins, cofactors, multivalent lactose, multivalent galactose, N-acetyl-galactosamine, N-acetyl-glucosamine multivalent mannose, or multivalent fucose. The ligand can be, for example, a lipopolysaccharide, an activator of p38 MAP kinase, or an activator of NF-κB.

[0469] The ligand can be a substance, e.g., a drug, which can increase the uptake of the RNA silencing agent into the cell, for example, by disrupting the cell's cytoskeleton, e.g., by disrupting the cell's microtubules, microfilaments, and/or intermediate filaments. The drug can be, for example, taxon, vincristine, vinblastine, cytochalasin, nocodazole, japlakinolide, latrunculin A, phalloidin, swinholide A, indanocine, or myoservin. The ligand can increase the uptake of the RNA silencing agent into the cell by activating an inflammatory response, for example. Exemplary ligands that would have such an effect include tumor necrosis factor alpha (TNF D), interleukin-1 beta, or gamma interferon. In one aspect, the ligand is a lipid or lipid-based molecule. Such a lipid or lipid-based molecule can bind a serum protein, e.g., human serum albumin (HSA). An HSA binding ligand allows for distribution of the conjugate to a target tissue, e.g., a non-kidney target tissue of the body. For example, the target tissue can be the liver, including parenchymal cells of the liver. Other molecules that can bind HSA can also be used as ligands. For example, neproxin or aspirin can be used. A lipid or lipid-based ligand can (a) increase resistance to degradation of the conjugate, (b) increase targeting or transport into a target cell or cell membrane, and/or (c) can be used to adjust binding to a serum protein, e.g., HSA. A lipid based ligand can be used to modulate, e.g., control the binding of the conjugate to a target tissue. For example, a lipid or lipid-based ligand that binds to HSA more strongly will be less likely to be targeted to the kidney and therefore less likely to be cleared from the body. A lipid or lipid-based ligand that binds to HSA less strongly can be used to target the conjugate to the kidney. In a certain embodiment, the lipid based ligand binds HSA. A lipid-based ligand can bind HSA with a sufficient affinity such that the conjugate will be distributed to a non-kidney tissue. However, it is contemplated that the affinity not be so strong that the HSA-ligand binding cannot be reversed. In another embodiment, the lipid based ligand binds HSA weakly or not at all, such that the conjugate will be distributed to the kidney. Other moieties that target to kidney cells can also be used in place of or in addition to the lipid based ligand.

[0470] In another aspect, the ligand is a moiety, e.g., a vitamin, which is taken up by a target cell, e.g., a proliferating cell. These can be useful for treating disorders characterized by unwanted cell proliferation, e.g., of the malignant or non-malignant type, e.g., cancer cells. Exemplary vitamins include vitamin A, E, and K. Other exemplary vitamins include are B vitamin, e.g., folic acid, B12, riboflavin, biotin, pyridoxal or other vitamins or nutrients taken up by cancer cells. Also included are HSA and low density lipoprotein (LDL).

[0471] In another aspect, the ligand is a cell-permeation agent, such as a helical cell-permeation agent. In certain embodiments, the agent is amphipathic. An exemplary agent is a peptide such as tat or antennopedia. If the agent is a peptide, it can be modified, including a peptidylmimetic, invertomers, non-peptide or pseudo-peptide linkages, and use of D-amino acids. The helical agent can be an alpha-helical agent, which may have a lipophilic and a lipophobic phase.

[0472] The ligand can be a peptide or peptidomimetic. A peptidomimetic (also referred to herein as an oligopeptidomimetic) is a molecule capable of folding into a defined three-dimensional structure similar to a natural peptide. The attachment of peptide and peptidomimetics to oligonucleotide agents can affect pharmacokinetic distribution of the RNA silencing agent, such as by enhancing cellular recognition and absorption. The peptide or peptidomimetic moiety can be about 5-50 amino acids long, e.g., about 5, 10, 15, 20, 25, 30, 35, 40, 45, or 50 amino acids long. A peptide or peptidomimetic can be, for example, a cell permeation peptide, cationic peptide, amphipathic peptide, or hydrophobic peptide (e.g., consisting primarily of Tyr, Trp or Phe). The peptide moiety can be a dendrimer peptide, constrained peptide or crosslinked peptide. The peptide moiety can be an L-peptide or D-peptide. In another alternative, the peptide moiety can include a hydrophobic membrane translocation sequence (MTS). A peptide or peptidomimetic can be encoded by a random sequence of DNA, such as a peptide identified from a phage-display library, or one-bead-one-compound (OBOC) combinatorial library (Lam et al., Nature 354:82-84, 1991). In exemplary embodiments, the peptide or peptidomimetic tethered to an RNA silencing agent via an incorporated monomer unit is a cell targeting peptide such as an arginine-glycine-aspartic acid (RGD)-peptide, or RGD mimic. A peptide moiety can range in length from about 5 amino acids to about 40 amino acids. The peptide moieties can have a structural modification, such as to increase stability or direct conformational properties. Any of the structural modifications described below can be utilized.

[0473] In certain embodiments, the functional moiety is linked to the 5′ end and/or 3′ end of the RNA silencing agent of the disclosure. In certain embodiments, the functional moiety is linked to the 5′ end and/or 3′ end of an antisense strand of the RNA silencing agent of the disclosure. In certain embodiments, the functional moiety is linked to the 5′ end and/or 3′ end of a sense strand of the RNA silencing agent of the disclosure. In certain embodiments, the functional moiety is linked to the 3′ end of a sense strand of the RNA silencing agent of the disclosure.

[0474] In certain embodiments, the functional moiety is linked to the RNA silencing agent by a linker. In certain embodiments, the functional moiety is linked to the antisense strand and/or sense strand by a linker. In certain embodiments, the functional moiety is linked to the 3′ end of a sense strand by a linker. In certain embodiments, the linker comprises a divalent or trivalent linker. In certain embodiments, the linker comprises an ethylene glycol chain, an alkyl chain, a peptide, RNA, DNA, a phosphodiester, a phosphorothioate, a phosphoramidate, an amide, a carbamate, or a combination thereof. In certain embodiments, the divalent or trivalent linker is selected from:

[chemical structure]

wherein n is 1, 2, 3, 4, or 5.

[0475] In certain embodiments, the linker further comprises a phosphodiester or phosphodiester derivative. In certain embodiments, the phosphodiester or phosphodiester derivative is selected from the group consisting of.

[chemical structure]

wherein X is O, S or BH₃.

[0476] The various functional moieties of the disclosure and means to conjugate them to RNA silencing agents are described in further detail in WO2017/030973A1 and WO2018/031933A2, incorporated herein by reference.

[0477] VI. Branched Oligonucleotides

[0478] Two or more RNA silencing agents as disclosed supra, for example oligonucleotide constructs such as anti-SARS-CoV-2 siRNAs, may be connected to one another by one or more moieties independently selected from a linker, a spacer and a branching point, to form a branched oligonucleotide RNA silencing agent. In certain embodiments, the branched oligonucleotide RNA silencing agent consists of two siRNAs to form a di-branched siRNA (“di-siRNA”) scaffolding for delivering two siRNAs. In representative embodiments, the nucleic acids of the branched oligonucleotide each comprise an antisense strand (or portions thereof), wherein the antisense strand has sufficient complementarity to a target mRNA (e.g., SARS-CoV-2 mRNA) to mediate an RNA-mediated silencing mechanism (e.g. RNAi).

[0479] In exemplary embodiments, the branched oligonucleotides may have two to eight RNA silencing agents attached through a linker. The linker may be hydrophobic. In an embodiment, branched oligonucleotides of the present application have two to three oligonucleotides. In an embodiment, the oligonucleotides independently have substantial chemical stabilization (e.g., at least 40% of the constituent bases are chemically-modified). In an exemplary embodiment, the oligonucleotides have full chemical stabilization (i.e., all the constituent bases are chemically-modified). In some embodiments, branched oligonucleotides comprise one or more single-stranded phosphorothioated tails, each independently having two to twenty nucleotides. In a non-limiting embodiment, each single-stranded tail has two to ten nucleotides.

[0480] In certain embodiments, branched oligonucleotides are characterized by three properties: (1) a branched structure, (2) full metabolic stabilization, and (3) the presence of a single-stranded tail comprising phosphorothioate linkers. In certain embodiments, branched oligonucleotides have 2 or 3 branches. It is believed that the increased overall size of the branched structures promotes increased uptake. Also, without being bound by a particular theory of activity, multiple adjacent branches (e.g., 2 or 3) are believed to allow each branch to act cooperatively and thus dramatically enhance rates of internalization, trafficking and release.

[0481] Branched oligonucleotides are provided in various structurally diverse embodiments. In some embodiments nucleic acids attached at the branching points are single stranded or double stranded and consist of miRNA inhibitors, gapmers, mixmers, SSOs, PMOs, or PNAs. These single strands can be attached at their 3′ or 5′ end. Combinations of siRNA and single stranded oligonucleotides could also be used for dual function. In another embodiment, short nucleic acids complementary to the gapmers, mixmers, miRNA inhibitors, SSOs, PMOs, and PNAs are used to carry these active single-stranded nucleic acids and enhance distribution and cellular internalization. The short duplex region has a low melting temperature (Tₘ ˜37° C.) for fast dissociation upon internalization of the branched structure into the cell.

[0482] The Di-siRNA branched oligonucleotides may comprise chemically diverse conjugates, such as the functional moieties described above. Conjugated bioactive ligands may be used to enhance cellular specificity and to promote membrane association, internalization, and serum protein binding. Examples of bioactive moieties to be used for conjugation include DHA, GalNAc, and cholesterol. These moieties can be attached to Di-siRNA either through the connecting linker or spacer, or added via an additional linker or spacer attached to another free siRNA end.

[0483] Branched oligonucleotides comprise a variety of therapeutic nucleic acids, including siRNAs, ASOs, miRNAs, miRNA inhibitors, splice switching, PMOs, PNAs. In some embodiments, branched oligonucleotides further comprise conjugated hydrophobic moieties and exhibit unprecedented silencing and efficacy in vitro and in vivo.

[0484] Linkers

[0485] In an embodiment of the branched oligonucleotide, each linker is independently selected from an ethylene glycol chain, an alkyl chain, a peptide, RNA, DNA, a phosphate, a phosphonate, a phosphoramidate, an ester, an amide, a triazole, and combinations thereof; wherein any carbon or oxygen atom of the linker is optionally replaced with a nitrogen atom, bears a hydroxyl substituent, or bears an oxo substituent. In one embodiment, each linker is an ethylene glycol chain. In another embodiment, each linker is an alkyl chain. In another embodiment, each linker is a peptide. In another embodiment, each linker is RNA. In another embodiment, each linker is DNA. In another embodiment, each linker is a phosphate. In another embodiment, each linker is a phosphonate. In another embodiment, each linker is a phosphoramidate. In another embodiment, each linker is an ester. In another embodiment, each linker is an amide. In another embodiment, each linker is a triazole.

[0486] VII. Compound of Formula (I)

[0487] In another aspect, provided herein is a branched oligonucleotide compound of formula (I):

L-(N)ₙ (I)

[0488] wherein L is selected from an ethylene glycol chain, an alkyl chain, a peptide, RNA, DNA, a phosphate, a phosphonate, a phosphoramidate, an ester, an amide, a triazole, and combinations thereof, wherein formula (I) optionally further comprises one or more branch point B, and one or more spacer S; wherein B is independently for each occurrence a polyvalent organic species or derivative thereof, S is independently for each occurrence selected from an ethylene glycol chain, an alkyl chain, a peptide, RNA, DNA, a phosphate, a phosphonate, a phosphoramidate, an ester, an amide, a triazole, and combinations thereof.

[0489] Moiety N is an RNA duplex comprising a sense strand and an antisense strand; and n is 2, 3, 4, 5, 6, 7 or 8. In an embodiment, the antisense strand of N comprises a sequence substantially complementary to a SARS-CoV-2 nucleic acid sequence of any one of SEQ ID NOs: 1-10, as recited in Table 4 and Table 5.

[0490] In an embodiment, the antisense strand of N comprises a sequence substantially complementary to a SARS-CoV-2 nucleic acid sequence of any one of the 45-nucleotide target gene regions recited in Table 6A.

[0491] The sense strand and antisense strand may each independently comprise one or more chemical modifications.

[0492] In an embodiment, the compound of formula (I) has a structure selected from formulas (I-1)-(I-9) of Table 1.

TABLE 1

| | |
|---|---|
| [chemical structure] | (I-1) |
| [chemical structure] | (I-2) |
| [chemical structure] | (I-3) |
| [chemical structure] | (I-4) |
| [chemical structure] | (I-5) |
| [chemical structure] | (I-6) |
| [chemical structure] | (I-7) |
| [chemical structure] | (I-8) |
| [chemical structure] | (I-9) |

[0493] In one embodiment, the compound of formula (I) is formula (I-1). In another embodiment, the compound of formula (I) is formula (I-2). In another embodiment, the compound of formula (I) is formula (I-3). In another embodiment, the compound of formula (I) is formula (I-4). In another embodiment, the compound of formula (I) is formula (I-5). In another embodiment, the compound of formula (I) is formula (I-6). In another embodiment, the compound of formula (I) is formula (I-7). In another embodiment, the compound of formula (I) is formula (I-8). In another embodiment, the compound of formula (I) is formula (I-9).

[0494] In an embodiment of the compound of formula (I), each linker is independently selected from an ethylene glycol chain, an alkyl chain, a peptide, RNA, DNA, a phosphate, a phosphonate, a phosphoramidate, an ester, an amide, a triazole, and combinations thereof; wherein any carbon or oxygen atom of the linker is optionally replaced with a nitrogen atom, bears a hydroxyl substituent, or bears an oxo substituent. In one embodiment of the compound of formula (I), each linker is an ethylene glycol chain. In another embodiment, each linker is an alkyl chain. In another embodiment of the compound of formula (I), each linker is a peptide. In another embodiment of the compound of formula (I), each linker is RNA. In another embodiment of the compound of formula (I), each linker is DNA. In another embodiment of the compound of formula (I), each linker is a phosphate. In another embodiment, each linker is a phosphonate. In another embodiment of the compound of formula (I), each linker is a phosphoramidate. In another embodiment of the compound of formula (I), each linker is an ester. In another embodiment of the compound of formula (I), each linker is an amide. In another embodiment of the compound of formula (I), each linker is a triazole.

[0495] In one embodiment of the compound of formula (I), B is a polyvalent organic species. In another embodiment of the compound of formula (I), B is a derivative of a polyvalent organic species. In one embodiment of the compound of formula (I), B is a triol or tetrol derivative. In another embodiment, B is a tri- or tetra-carboxylic acid derivative. In another embodiment, B is an amine derivative. In another embodiment, B is a tri- or tetra-amine derivative. In another embodiment, B is an amino acid derivative. In another embodiment of the compound of formula (I), B is selected from the formulas of.

[chemical structure]

[0496] Polyvalent organic species are moieties comprising carbon and three or more valencies (i.e., points of attachment with moieties such as S, L or N, as defined above). Non-limiting examples of polyvalent organic species include triols (e.g., glycerol, phloroglucinol, and the like), tetrols (e.g., ribose, pentaerythritol, 1,2,3,5-tetrahydroxybenzene, and the like), tri-carboxylic acids (e.g., citric acid, 1,3,5-cyclohexanetricarboxylic acid, trimesic acid, and the like), tetra-carboxylic acids (e.g., ethylenediaminetetraacetic acid, pyromellitic acid, and the like), tertiary amines (e.g., tripropargylamine, triethanolamine, and the like), triamines (e.g., diethylenetriamine and the like), tetramines, and species comprising a combination of hydroxyl, thiol, amino, and/or carboxyl moieties (e.g., amino acids such as lysine, serine, cysteine, and the like).

[0497] In an embodiment of the compound of formula (I), each nucleic acid comprises one or more chemically-modified nucleotides. In an embodiment of the compound of formula (I), each nucleic acid consists of chemically-modified nucleotides. In certain embodiments of the compound of formula (I), >95%, >90%, >85%, >80%, >75%, >70%, >65%, >60%, >55% or >50% of each nucleic acid comprises chemically-modified nucleotides.

[0498] In an embodiment, each antisense strand independently comprises a 5′ terminal group R selected from the groups of Table 2.

TABLE 2

| | |
|---|---|
| [chemical structure] | R¹ |
| [chemical structure] | R² |
| [chemical structure] | R³ |
| [chemical structure] | R⁴ |
| [chemical structure] | R⁵ |
| [chemical structure] | R⁶ |
| [chemical structure] | R⁷ |
| [chemical structure] | R⁸ |

[0499] In one embodiment, R is R₁. In another embodiment, R is R₂. In another embodiment, R is R₃. In another embodiment, R is R₄. In another embodiment, R is R₅. In another embodiment, R is R₆. In another embodiment, R is R₇. In another embodiment, R is R₈.

[0500] Structure of Formula (II)

[0501] In an embodiment, the compound of formula (I) has the structure of formula (II):

[chemical structure]

[0502] wherein X, for each occurrence, independently, is selected from adenosine, guanosine, uridine, cytidine, and chemically-modified derivatives thereof; Y, for each occurrence, independently, is selected from adenosine, guanosine, uridine, cytidine, and chemically-modified derivatives thereof; - represents a phosphodiester internucleoside linkage; = represents a phosphorothioate internucleoside linkage; and --- represents, individually for each occurrence, a base-pairing interaction or a mismatch.

[0503] In certain embodiments, the structure of formula (II) does not contain mismatches. In one embodiment, the structure of formula (II) contains 1 mismatch. In another embodiment, the compound of formula (II) contains 2 mismatches. In another embodiment, the compound of formula (II) contains 3 mismatches. In another embodiment, the compound of formula (II) contains 4 mismatches. In an embodiment, each nucleic acid consists of chemically-modified nucleotides.

[0504] In certain embodiments, >95%, >90%, >85%, >80%, >75%, >70%, >65%, >60%, >55% or >50% of X's of the structure of formula (II) are chemically-modified nucleotides. In other embodiments, >95%, >90%, >85%, >80%, >75%, >70%, >65%, >60%, >55% or >50% of X's of the structure of formula (II) are chemically-modified nucleotides.

[0505] Structure of Formula (III)

[0506] In an embodiment, the compound of formula (I) has the structure of formula (III):

[chemical structure]

[0507] wherein X, for each occurrence, independently, is a nucleotide comprising a 2′-deoxy-2′-fluoro modification; X, for each occurrence, independently, is a nucleotide comprising a 2′-O-methyl modification; Y, for each occurrence, independently, is a nucleotide comprising a 2′-deoxy-2′-fluoro modification; and Y, for each occurrence, independently, is a nucleotide comprising a 2′-O-methyl modification.

[0508] In an embodiment, X is chosen from the group consisting of 2′-deoxy-2′-fluoro modified adenosine, guanosine, uridine or cytidine. In an embodiment, X is chosen from the group consisting of 2′-O-methyl modified adenosine, guanosine, uridine or cytidine. In an embodiment, Y is chosen from the group consisting of 2′-deoxy-2′-fluoro modified adenosine, guanosine, uridine or cytidine. In an embodiment, Y is chosen from the group consisting of 2′-O-methyl modified adenosine, guanosine, uridine or cytidine.

[0509] In certain embodiments, the structure of formula (III) does not contain mismatches. In one embodiment, the structure of formula (III) contains 1 mismatch. In another embodiment, the compound of formula (III) contains 2 mismatches. In another embodiment, the compound of formula (III) contains 3 mismatches. In another embodiment, the compound of formula (III) contains 4 mismatches.

[0510] Structure of Formula (IV)

[0511] In an embodiment, the compound of formula (I) has the structure of formula (IV):

[chemical structure]

[0512] wherein X, for each occurrence, independently, is selected from adenosine, guanosine, uridine, cytidine, and chemically-modified derivatives thereof; Y, for each occurrence, independently, is selected from adenosine, guanosine, uridine, cytidine, and chemically-modified derivatives thereof; - represents a phosphodiester internucleoside linkage; =represents a phosphorothioate internucleoside linkage; and --- represents, individually for each occurrence, a base-pairing interaction or a mismatch.

[0513] In certain embodiments, the structure of formula (IV) does not contain mismatches. In one embodiment, the structure of formula (IV) contains 1 mismatch. In another embodiment, the compound of formula (IV) contains 2 mismatches. In another embodiment, the compound of formula (IV) contains 3 mismatches. In another embodiment, the compound of formula (IV) contains 4 mismatches. In an embodiment, each nucleic acid consists of chemically-modified nucleotides.

[0514] In certain embodiments, >95%, >90%, >85%, >80%, >75%, >70%, >65%, >60%, >55% or >50% of X's of the structure of formula (IV) are chemically-modified nucleotides. In other embodiments, >95%, >90%, >85%, >80%, >75%, >70%, >65%, >60%, >55% or >50% of X's of the structure of formula (IV) are chemically-modified nucleotides.

[0515] Structure of Formula (V)

[0516] In an embodiment, the compound of formula (I) has the structure of formula (V):

[chemical structure]

[0517] wherein X, for each occurrence, independently, is a nucleotide comprising a 2′-deoxy-2′-fluoro modification; X, for each occurrence, independently, is a nucleotide comprising a 2′-O-methyl modification; Y, for each occurrence, independently, is a nucleotide comprising a 2′-deoxy-2′-fluoro modification; and Y, for each occurrence, independently, is a nucleotide comprising a 2′-O-methyl modification.

[0518] In certain embodiments, X is chosen from the group consisting of 2′-deoxy-2′-fluoro modified adenosine, guanosine, uridine or cytidine. In an embodiment, X is chosen from the group consisting of 2′-O-methyl modified adenosine, guanosine, uridine or cytidine. In an embodiment, Y is chosen from the group consisting of 2′-deoxy-2′-fluoro modified adenosine, guanosine, uridine or cytidine. In an embodiment, Y is chosen from the group consisting of 2′-O-methyl modified adenosine, guanosine, uridine or cytidine.

[0519] In certain embodiments, the structure of formula (V) does not contain mismatches. In one embodiment, the structure of formula (V) contains 1 mismatch. In another embodiment, the compound of formula (V) contains 2 mismatches. In another embodiment, the compound of formula (V) contains 3 mismatches. In another embodiment, the compound of formula (V) contains 4 mismatches.

[0520] Variable Linkers

[0521] In an embodiment of the compound of formula (I), L has the structure of L1:

[chemical structure]

[0522] In an embodiment of L1, R is R³ and n is 2.

[0523] In an embodiment of the structure of formula (II), L has the structure of L1. In an embodiment of the structure of formula (III), L has the structure of L1. In an embodiment of the structure of formula (IV), L has the structure of L1. In an embodiment of the structure of formula (V), L has the structure of L1. In an embodiment of the structure of formula (VI), L has the structure of L1. In an embodiment of the structure of formula (VI), L has the structure of L1.

[0524] In an embodiment of the compound of formula (I), L has the structure of L2:

[chemical structure]

[0525] In an embodiment of L2, R is R3 and n is 2. In an embodiment of the structure of formula (II), L has the structure of L2. In an embodiment of the structure of formula (III), L has the structure of L2. In an embodiment of the structure of formula (IV), L has the structure of L2. In an embodiment of the structure of formula (V), L has the structure of L2. In an embodiment of the structure of formula (VI), L has the structure of L2. In an embodiment of the structure of formula (VI), L has the structure of L2.

[0526] Delivery System

[0527] In a third aspect, provided herein is a delivery system for therapeutic nucleic acids having the structure of formula (VI):

L-(cNA)ₙ (VI)

[0528] wherein L is selected from an ethylene glycol chain, an alkyl chain, a peptide, RNA, DNA, a phosphate, a phosphonate, a phosphoramidate, an ester, an amide, a triazole, and combinations thereof, wherein formula (VI) optionally further comprises one or more branch point B, and one or more spacer S; wherein B is independently for each occurrence a polyvalent organic species or derivative thereof; S is independently for each occurrence selected from an ethylene glycol chain, an alkyl chain, a peptide, RNA, DNA, a phosphate, a phosphonate, a phosphoramidate, an ester, an amide, a triazole, and combinations thereof; each cNA, independently, is a carrier nucleic acid comprising one or more chemical modifications; and n is 2, 3, 4, 5, 6, 7 or 8.

[0529] In one embodiment of the delivery system, L is an ethylene glycol chain. In another embodiment of the delivery system, L is an alkyl chain. In another embodiment of the delivery system, L is a peptide. In another embodiment of the delivery system, L is RNA. In another embodiment of the delivery system, L is DNA. In another embodiment of the delivery system, L is a phosphate. In another embodiment of the delivery system, L is a phosphonate. In another embodiment of the delivery system, L is a phosphoramidate. In another embodiment of the delivery system, L is an ester. In another embodiment of the delivery system, L is an amide. In another embodiment of the delivery system, L is a triazole.

[0530] In one embodiment of the delivery system, S is an ethylene glycol chain. In another embodiment, S is an alkyl chain. In another embodiment of the delivery system, S is a peptide. In another embodiment, S is RNA. In another embodiment of the delivery system, S is DNA. In another embodiment of the delivery system, S is a phosphate. In another embodiment of the delivery system, S is a phosphonate. In another embodiment of the delivery system, S is a phosphoramidate. In another embodiment of the delivery system, S is an ester. In another embodiment, S is an amide. In another embodiment, S is a triazole.

[0531] In one embodiment of the delivery system, n is 2. In another embodiment of the delivery system, n is 3. In another embodiment of the delivery system, n is 4. In another embodiment of the delivery system, n is 5. In another embodiment of the delivery system, n is 6. In another embodiment of the delivery system, n is 7. In another embodiment of the delivery system, n is 8.

[0532] In certain embodiments, each cNA comprises >95%, >90%, >85%, >80%, >75%, >70%, >65%, >60%, >5500 or >5000 chemically-modified nucleotides.

[0533] In an embodiment, the compound of formula (VI) has a structure selected from formulas (VI-1)-(VI-9) of Table 3:

TABLE 3

| | |
|---|---|
| [chemical structure] | (VI-1) |
| [chemical structure] | (VI-2) |
| [chemical structure] | (VI-3) |
| [chemical structure] | (VI-4) |
| [chemical structure] | (VI-5) |
| [chemical structure] | (VI-6) |
| [chemical structure] | (VI-7) |
| [chemical structure] | (VI-8) |
| [chemical structure] | (VI-9) |

[0534] In an embodiment, the compound of formula (VI) is the structure of formula (VI-1). In an embodiment, the compound of formula (VI) is the structure of formula (VI-2). In an embodiment, the compound of formula (VI) is the structure of formula (VI-3). In an embodiment, the compound of formula (VI) is the structure of formula (VI-4). In an embodiment, the compound of formula (VI) is the structure of formula (VI-5). In an embodiment, the compound of formula (VI) is the structure of formula (VI-6). In an embodiment, the compound of formula (VI) is the structure of formula (VI-7). In an embodiment, the compound of formula (VI) is the structure of formula (VI-8). In an embodiment, the compound of formula (VI) is the structure of formula (VI-9).

[0535] In an embodiment, the compound of formulas (VI) (including, e.g., formulas (VI-1)-(VI-9), each cNA independently comprises at least 15 contiguous nucleotides. In an embodiment, each cNA independently consists of chemically-modified nucleotides.

[0536] In an embodiment, the delivery system further comprises n therapeutic nucleic acids (NA), wherein each NA comprises a sequence substantially complementary to a SARS-CoV-2 nucleic acid sequence of any one of SEQ ID NOs: 1-10, as recited in Table 4 and Table. In further embodiments, NA includes strands that are capable of targeting one or more SARS-CoV-2 nucleic acid sequences of any one of the 45-nucleotide target gene regions recited in Table 6A.

[0537] Also, each NA is hybridized to at least one cNA. In one embodiment, the delivery system is comprised of 2 NAs. In another embodiment, the delivery system is comprised of 3 NAs. In another embodiment, the delivery system is comprised of 4 NAs. In another embodiment, the delivery system is comprised of 5 NAs. In another embodiment, the delivery system is comprised of 6 NAs. In another embodiment, the delivery system is comprised of 7 NAs. In another embodiment, the delivery system is comprised of 8 NAs.

[0538] In an embodiment, each NA independently comprises at least 15 contiguous nucleotides. In an embodiment, each NA independently comprises 15-25 contiguous nucleotides. In an embodiment, each NA independently comprises 15 contiguous nucleotides. In an embodiment, each NA independently comprises 16 contiguous nucleotides. In another embodiment, each NA independently comprises 17 contiguous nucleotides. In another embodiment, each NA independently comprises 18 contiguous nucleotides. In another embodiment, each NA independently comprises 19 contiguous nucleotides. In another embodiment, each NA independently comprises 20 contiguous nucleotides. In an embodiment, each NA independently comprises 21 contiguous nucleotides. In an embodiment, each NA independently comprises 22 contiguous nucleotides. In an embodiment, each NA independently comprises 23 contiguous nucleotides. In an embodiment, each NA independently comprises 24 contiguous nucleotides. In an embodiment, each NA independently comprises 25 contiguous nucleotides.

[0539] In an embodiment, each NA comprises an unpaired overhang of at least 2 nucleotides. In another embodiment, each NA comprises an unpaired overhang of at least 3 nucleotides. In another embodiment, each NA comprises an unpaired overhang of at least 4 nucleotides. In another embodiment, each NA comprises an unpaired overhang of at least 5 nucleotides. In another embodiment, each NA comprises an unpaired overhang of at least 6 nucleotides. In an embodiment, the nucleotides of the overhang are connected via phosphorothioate linkages.

[0540] In an embodiment, each NA, independently, is selected from the group consisting of: DNA, siRNAs, antagomiRs, miRNAs, gapmers, mixmers, or guide RNAs. In one embodiment, each NA, independently, is a DNA. In another embodiment, each NA, independently, is a siRNA. In another embodiment, each NA, independently, is an antagomiR. In another embodiment, each NA, independently, is a miRNA. In another embodiment, each NA, independently, is a gapmer. In another embodiment, each NA, independently, is a mixmer. In another embodiment, each NA, independently, is a guide RNA. In an embodiment, each NA is the same. In an embodiment, each NA is not the same.

[0541] In an embodiment, the delivery system further comprising n therapeutic nucleic acids (NA) has a structure selected from formulas (I), (II), (III), (IV), (V), (VI), and embodiments thereof described herein. In one embodiment, the delivery system has a structure selected from formulas (I), (II), (III), (IV), (V), (VI), and embodiments thereof described herein further comprising 2 therapeutic nucleic acids (NA). In another embodiment, the delivery system has a structure selected from formulas (I), (II), (III), (IV), (V), (VI), and embodiments thereof described herein further comprising 3 therapeutic nucleic acids (NA). In one embodiment, the delivery system has a structure selected from formulas (I), (II), (III), (IV), (V), (VI), and embodiments thereof described herein further comprising 4 therapeutic nucleic acids (NA). In one embodiment, the delivery system has a structure selected from formulas (I), (II), (III), (IV), (V), (VI), and embodiments thereof described herein further comprising 5 therapeutic nucleic acids (NA). In one embodiment, the delivery system has a structure selected from formulas (I), (II), (III), (IV), (V), (VI), and embodiments thereof described herein further comprising 6 therapeutic nucleic acids (NA). In one embodiment, the delivery system has a structure selected from formulas (I), (II), (III), (IV), (V), (VI), and embodiments thereof described herein further comprising 7 therapeutic nucleic acids (NA). In one embodiment, the delivery system has a structure selected from formulas (I), (II), (III), (IV), (V), (VI), and embodiments thereof described herein further comprising 8 therapeutic nucleic acids (NA).

[0542] In one embodiment, the delivery system has a structure selected from formulas (I), (II), (III), (IV), (V), (VI), further comprising a linker of structure L1 or L2 wherein R is R³ and n is 2. In another embodiment, the delivery system has a structure selected from formulas (I), (II), (III), (IV), (V), (VI), further comprising a linker of structure L1 wherein R is R³ and n is 2. In another embodiment, the delivery system has a structure selected from formulas (I), (II), (III), (IV), (V), (VI), further comprising a linker of structure L2 wherein R is R³ and n is 2.

[0543] In an embodiment of the delivery system, the target of delivery is selected from the group consisting of: lung, brain, liver, skin, kidney, spleen, pancreas, colon, fat, muscle, adrenal glands, and thymus. In one embodiment, the target of delivery is the lung. In another embodiment, the target of delivery are alveolar cells in the lung. In another embodiment, the target of delivery are club cells in the lung. In another embodiment, the target of delivery is the striatum of the brain. In one embodiment, the target of delivery is the liver. In one embodiment, the target of delivery is the skin. In one embodiment, the target of delivery is the kidney. In one embodiment, the target of delivery is the spleen. In one embodiment, the target of delivery is the pancreas. In one embodiment, the target of delivery is the colon. In one embodiment, the target of delivery is the fat. In one embodiment, the target of delivery are the adrenal glands. In one embodiment, the target of delivery is the muscle. In one embodiment, the target of delivery is the thymus. In one embodiment, the target of delivery is the spinal cord.

[0544] In one embodiment, efficacy of delivery to lung cells is achieved through combinations of unique conjugates, optimization of siRNA stability, structural configuration, cleavable linker, and Phosphorothioate (PS) content. In another embodiment, three conjugates, EPA, DCA and PC-DCA, have different distribution profiles. In one embodiment, DCA and PC-DCA are being cleared mostly by the liver and EPA is being cleared mostly by the kidneys. In another embodiment the two classes of conjugates show different cell-type preferences in the lung, where EPA accumulation is higher in epithelial (Clara) cells of the lung.

[0545] In certain embodiments, compounds of the invention are characterized by the following properties: (1) two or more branched oligonucleotides, e.g., wherein there is a non-equal number of 3′ and 5′ ends; (2) substantially chemically stabilized, e.g., wherein more than 40%, optimally 100%, of oligonucleotides are chemically modified (e.g., no RNA and optionally no DNA); and (3) phoshorothioated single oligonucleotides containing at least 3, phosphorothioated bonds. In certain embodiments, the phoshorothioated single oligonucleotides contain 4-20 phosphorothioated bonds.

[0546] It is to be understood that the methods described in this disclosure are not limited to particular methods and experimental conditions disclosed herein; as such methods and conditions may vary. It is also to be understood that the terminology used herein is for the purpose of describing particular embodiments only, and is not intended to be limiting.

[0547] Furthermore, the experiments described herein, unless otherwise indicated, use conventional molecular and cellular biological and immunological techniques within the skill of the art. Such techniques are well known to the skilled worker, and are explained fully in the literature. See, e.g., Ausubel, et al., ed., Current Protocols in Molecular Biology, John Wiley & Sons, Inc., NY (1987-2008), including all supplements, Molecular Cloning: A Laboratory Manual (Fourth Edition) by M R Green and J. Sambrook and Harlow et al., Antibodies: A Laboratory Manual, Chapter 14, Cold Spring Harbor Laboratory, Cold Spring Harbor (2013, 2nd edition).

[0548] Branched oligonucleotides, including synthesis and methods of use, are described in greater detail in WO2017/132669, incorporated herein by reference.

[0549] Methods of Introducing Nucleic Acids, Vectors and Host Cells

[0550] RNA silencing agents of the invention may be directly introduced into the cell (e.g., a cell in the lung) (i.e., intracellularly); or introduced extracellularly into a cavity, interstitial space, into the circulation of an organism, introduced orally, or may be introduced by bathing a cell or organism in a solution containing the nucleic acid. Vascular or extravascular circulation, the blood or lymph system, and the cerebrospinal fluid are sites where the nucleic acid may be introduced.

[0551] The RNA silencing agents of the invention can be introduced using nucleic acid delivery methods known in art including injection of a solution containing the nucleic acid, bombardment by particles covered by the nucleic acid, soaking the cell or organism in a solution of the nucleic acid, or electroporation of cell membranes in the presence of the nucleic acid. Other methods known in the art for introducing nucleic acids to cells may be used, such as lipid-mediated carrier transport, chemical-mediated transport, and cationic liposome transfection such as calcium phosphate, and the like. The nucleic acid may be introduced along with other components that perform one or more of the following activities: enhance nucleic acid uptake by the cell or other-wise increase inhibition of the target gene.

[0552] Physical methods of introducing nucleic acids include injection of a solution containing the RNA, bombardment by particles covered by the RNA, soaking the cell or organism in a solution of the RNA, or electroporation of cell membranes in the presence of the RNA. A viral construct packaged into a viral particle would accomplish both efficient introduction of an expression construct into the cell and transcription of RNA encoded by the expression construct. Other methods known in the art for introducing nucleic acids to cells may be used, such as lipid-mediated carrier transport, chemical-mediated transport, such as calcium phosphate, and the like. Thus, the RNA may be introduced along with components that perform one or more of the following activities: enhance RNA uptake by the cell, inhibit annealing of single strands, stabilize the single strands, or other-wise increase inhibition of the target gene.

[0553] RNA may be directly introduced into the cell (i.e., intracellularly); or introduced extracellularly into a cavity, interstitial space, into the circulation of an organism, introduced orally, or may be introduced by bathing a cell or organism in a solution containing the RNA. Vascular or extravascular circulation, the blood or lymph system, and the cerebrospinal fluid are sites where the RNA may be introduced.

[0554] The cell having the target gene may be from the germ line or somatic, totipotent or pluripotent, dividing or non-dividing, parenchyma or epithelium, immortalized or transformed, or the like. The cell may be a stem cell or a differentiated cell. Cell types that are differentiated include adipocytes, fibroblasts, myocytes, cardiomyocytes, endothelium, neurons, glia, blood cells, megakaryocytes, lymphocytes, macrophages, neutrophils, eosinophils, basophils, mast cells, leukocytes, granulocytes, keratinocytes, chondrocytes, osteoblasts, osteoclasts, hepatocytes, and cells of the endocrine or exocrine glands.

[0555] Depending on the particular target gene and the dose of double stranded RNA material delivered, this process may provide partial or complete loss of function for the target gene. A reduction or loss of gene expression in at least 50%, 60%, 70%, 80%, 90%, 95% or 99% or more of targeted cells is exemplary. Inhibition of gene expression refers to the absence (or observable decrease) in the level of protein and/or mRNA product from a target gene. Specificity refers to the ability to inhibit the target gene without manifest effects on other genes of the cell. The consequences of inhibition can be confirmed by examination of the outward properties of the cell or organism (as presented below in the examples) or by biochemical techniques such as RNA solution hybridization, nuclease protection, Northern hybridization, reverse transcription, gene expression monitoring with a microarray, antibody binding, Enzyme Linked ImmunoSorbent Assay (ELISA), Western blotting, RadioImmunoAssay (RIA), other immunoassays, and Fluorescence Activated Cell Sorting (FACS).

[0556] For RNA-mediated inhibition in a cell line or whole organism, gene expression is conveniently assayed by use of a reporter or drug resistance gene whose protein product is easily assayed. Such reporter genes include acetohydroxyacid synthase (AHAS), alkaline phosphatase (AP), beta galactosidase (LacZ), beta glucoronidase (GUS), chloramphenicol acetyltransferase (CAT), green fluorescent protein (GFP), horseradish peroxidase (HRP), luciferase (Luc), nopaline synthase (NOS), octopine synthase (OCS), and derivatives thereof. Multiple selectable markers are available that confer resistance to ampicillin, bleomycin, chloramphenicol, gentamycin, hygromycin, kanamycin, lincomycin, methotrexate, phosphinothricin, puromycin, and tetracycline. Depending on the assay, quantitation of the amount of gene expression allows one to determine a degree of inhibition which is greater than 10%, 33%, 50%, 90%, 95% or 99% as compared to a cell not treated according to the present invention. Lower doses of injected material and longer times after administration of RNAi agent may result in inhibition in a smaller fraction of cells (e.g., at least 10%, 20%, 50%, 75%, 90%, or 95% of targeted cells). Quantization of gene expression in a cell may show similar amounts of inhibition at the level of accumulation of target mRNA or translation of target protein. As an example, the efficiency of inhibition may be determined by assessing the amount of gene product in the cell; mRNA may be detected with a hybridization probe having a nucleotide sequence outside the region used for the inhibitory double-stranded RNA, or translated polypeptide may be detected with an antibody raised against the polypeptide sequence of that region.

[0557] The RNA may be introduced in an amount which allows delivery of at least one copy per cell. Higher doses (e.g., at least 5, 10, 100, 500 or 1000 copies per cell) of material may yield more effective inhibition; lower doses may also be useful for specific applications.

[0558] In an exemplary aspect, the efficacy of an RNAi agent of the invention (e.g., an siRNA targeting an SARS-CoV-2 target sequence) is tested for its ability to specifically degrade mutant mRNA (e.g., SARS-CoV-2 mRNA and/or the production of SARS-CoV-2 protein) in cells, such as cells in the lung. In certain embodiments, cells in the lung include, but are not limited to, clara cells, alveolar cells, and club cells. Also suitable for cell-based validation assays are other readily transfectable cells, for example, HeLa cells or COS cells. Cells are transfected with human wild type or mutant cDNAs (e.g., human wild type or mutant SARS-CoV-2 cDNA). Standard siRNA, modified siRNA or vectors able to produce siRNA from U-looped mRNA are co-transfected. Selective reduction in target mRNA (e.g., SARS-CoV-2 mRNA) and/or target protein (e.g., SARS-CoV-2 protein) is measured. Reduction of target mRNA or protein can be compared to levels of target mRNA or protein in the absence of an RNAi agent or in the presence of an RNAi agent that does not target SARS-CoV-2 mRNA. Exogenously-introduced mRNA or protein (or endogenous mRNA or protein) can be assayed for comparison purposes. When utilizing lung cells, it may be desirable to introduce RNAi agents (e.g., siRNAs) by passive uptake.

[0559] Recombinant Adeno-Associated Viruses and Vectors

[0560] In certain exemplary embodiments, recombinant adeno-associated viruses (rAAVs) and their associated vectors can be used to deliver one or more siRNAs into cells, e.g., lung cells (e.g., clara cells, alveolar cells or club cells). AAV is able to infect many different cell types, although the infection efficiency varies based upon serotype, which is determined by the sequence of the capsid protein. Several native AAV serotypes have been identified, with serotypes 1-9 being the most commonly used for recombinant AAV. AAV-2 is the most well-studied and published serotype. The AAV-DJ system includes serotypes AAV-DJ and AAV-DJ/8. These serotypes were created through DNA shuffling of multiple AAV serotypes to produce AAV with hybrid capsids that have improved transduction efficiencies in vitro (AAV-DJ) and in vivo (AAV-DJ/8) in a variety of cells and tissues.

[0561] In certain embodiments, widespread lung delivery can be achieved by intratracheal (IT) delivery of recombinant adeno-associated virus 7 (rAAV7), RAAV9 and rAAV10, or other suitable rAAVs. rAAVs and their associated vectors are well-known in the art and are described in US Patent Applications 2014/0296486, 2010/0186103, 2008/0269149, 2006/0078542 and 2005/0220766, each of which is incorporated herein by reference in its entirety for all purposes.

[0562] rAAVs may be delivered to a subject in compositions according to any appropriate methods known in the art. An rAAV can be suspended in a physiologically compatible carrier (i.e., in a composition), and may be administered to a subject, i.e., a host animal, such as a human, mouse, rat, cat, dog, sheep, rabbit, horse, cow, goat, pig, guinea pig, hamster, chicken, turkey, a non-human primate (e.g., Macaque) or the like. In certain embodiments, a host animal is a non-human host animal.

[0563] Delivery of one or more rAAVs to a mammalian subject may be performed, for example, by intramuscular injection or by administration into the bloodstream of the mammalian subject. Administration into the bloodstream may be by injection into a vein, an artery, or any other vascular conduit. In certain embodiments, one or more rAAVs are administered into the bloodstream by way of isolated limb perfusion, a technique well known in the surgical arts, the method essentially enabling the artisan to isolate a limb from the systemic circulation prior to administration of the rAAV virions. A variant of the isolated limb perfusion technique, described in U.S. Pat. No. 6,177,403, can also be employed by the skilled artisan to administer virions into the vasculature of an isolated limb to potentially enhance transduction into muscle cells or tissue. Moreover, in certain instances, it may be desirable to deliver virions to the lung of a subject. By “lung” is meant all cells and tissue of the lung of a vertebrate. Thus, the term includes, but is not limited to, clara cells, alveolar cells, club cells, and the like. Recombinant AAVs may be delivered directly to the lung by injection, e.g., intratracheal injection.

[0564] The compositions of the invention may comprise an rAAV alone, or in combination with one or more other viruses (e.g., a second rAAV encoding having one or more different transgenes). In certain embodiments, a composition comprises 1, 2, 3, 4, 5, 6, 7, 8, 9, 10 or more different rAAVs each having one or more different transgenes.

[0565] An effective amount of an rAAV is an amount sufficient to target infect an animal, target a desired tissue. In some embodiments, an effective amount of an rAAV is an amount sufficient to produce a stable somatic transgenic animal model. The effective amount will depend primarily on factors such as the species, age, weight, health of the subject, and the tissue to be targeted, and may thus vary among animal and tissue. For example, an effective amount of one or more rAAVs is generally in the range of from about 1 ml to about 100 ml of solution containing from about 109 to 10¹⁶ genome copies. In some cases, a dosage between about 10¹¹ to 10¹² rAAV genome copies is appropriate. In certain embodiments, 10¹² rAAV genome copies is effective to target lung, heart, liver, and pancreas tissues. In some cases, stable transgenic animals are produced by multiple doses of an rAAV.

[0566] In some embodiments, rAAV compositions are formulated to reduce aggregation of AAV particles in the composition, particularly where high rAAV concentrations are present (e.g., about 10¹³ genome copies/mL or more). Methods for reducing aggregation of rAAVs are well known in the art and, include, for example, addition of surfactants, pH adjustment, salt concentration adjustment, etc. (See, e.g., Wright et al. (2005) Molecular Therapy 12:171-178, the contents of which are incorporated herein by reference.)

[0567] “Recombinant AAV (rAAV) vectors” comprise, at a minimum, a transgene and its regulatory sequences, and 5′ and 3′ AAV inverted terminal repeats (ITRs). It is this recombinant AAV vector which is packaged into a capsid protein and delivered to a selected target cell. In some embodiments, the transgene is a nucleic acid sequence, heterologous to the vector sequences, which encodes a polypeptide, protein, functional RNA molecule (e.g., siRNA) or other gene product, of interest. The nucleic acid coding sequence is operatively linked to regulatory components in a manner which permits transgene transcription, translation, and/or expression in a cell of a target tissue.

[0568] The AAV sequences of the vector typically comprise the cis-acting 5′ and 3′ inverted terminal repeat (ITR) sequences (See, e.g., B. J. Carter, in “Handbook of Parvoviruses”, ed., P. Tijsser, CRC Press, pp. 155 168 (1990)). The ITR sequences are usually about 145 basepairs in length. In certain embodiments, substantially the entire sequences encoding the ITRs are used in the molecule, although some degree of minor modification of these sequences is permissible. The ability to modify these ITR sequences is within the skill of the art. (See, e.g., texts such as Sambrook et al, “Molecular Cloning. A Laboratory Manual”, 2d ed., Cold Spring Harbor Laboratory, New York (1989); and K. Fisher et al., J Virol., 70:520 532 (1996)). An example of such a molecule employed in the present invention is a “cis-acting” plasmid containing the transgene, in which the selected transgene sequence and associated regulatory elements are flanked by the 5′ and 3′ AAV ITR sequences. The AAV ITR sequences may be obtained from any known AAV, including mammalian AAV types described further herein.

[0569] VIII. Methods of Treatment

[0570] In one aspect, the present invention provides for both prophylactic and therapeutic methods of treating a subject at risk of (or susceptible to) SARS-CoV-2 infection. In one embodiment, the disease or disorder is such that SARS-CoV-2 levels in blood or another biological sample have been found to be a marker of infection. In another embodiment, the infection with SARS-CoV-2 is characterized by a clinical manifestation of viral infection, e.g. an increase in body temperature. In a certain embodiment, a reduction in SARS-CoV-2 mRNA reduces clinical manifestations of SARS-CoV-2 infection.

[0571] “Treatment,” or “treating,” as used herein, is defined as the application or administration of a therapeutic agent (e.g., a RNA agent or vector or transgene encoding same) to a patient, or application or administration of a therapeutic agent to an isolated tissue or cell line from a patient, who has the disease or disorder, a symptom of disease or disorder or a predisposition toward a disease or disorder, with the purpose to cure, heal, alleviate, relieve, alter, remedy, ameliorate, improve or affect the disease or disorder, the symptoms of the disease or disorder, or the predisposition toward disease.

[0572] In one aspect, the invention provides a method for preventing in a subject, a disease or disorder as described above, by administering to the subject a therapeutic agent (e.g., an RNAi agent or vector or transgene encoding same). Subjects at risk for the disease can be identified by, for example, any or a combination of diagnostic or prognostic assays as described herein. Administration of a prophylactic agent can occur prior to the manifestation of symptoms characteristic of the disease or disorder, such that the disease or disorder is prevented or, alternatively, delayed in its progression.

[0573] Another aspect of the invention pertains to methods treating subjects therapeutically, i.e., alter onset of symptoms of the disease or disorder. In an exemplary embodiment, the modulatory method of the invention involves contacting a lung cell with a therapeutic agent (e.g., a RNAi agent or vector or transgene encoding same) that is specific for a target sequence within the gene (e.g., SARS-CoV-2 target sequences of Tables 4, 5, 6A, 7, and 8), such that sequence specific interference with the gene is achieved. These methods can be performed in vitro (e.g., by culturing the cell with the agent) or, alternatively, in vivo (e.g., by administering the agent to a subject).

[0574] IX. Pharmaceutical Compositions and Methods of Administration

[0575] The invention pertains to uses of the above-described agents for prophylactic and/or therapeutic treatments as described infra. Accordingly, the modulators (e.g., RNAi agents) of the present invention can be incorporated into pharmaceutical compositions suitable for administration. Such compositions typically comprise the nucleic acid molecule, protein, antibody, or modulatory compound and a pharmaceutically acceptable carrier. As used herein the language “pharmaceutically acceptable carrier” is intended to include any and all solvents, dispersion media, coatings, antibacterial and antifungal agents, isotonic and absorption delaying agents, and the like, compatible with pharmaceutical administration. The use of such media and agents for pharmaceutically active substances is well known in the art. Except insofar as any conventional media or agent is incompatible with the active compound, use thereof in the compositions is contemplated. Supplementary active compounds can also be incorporated into the compositions.

[0576] A pharmaceutical composition of the invention is formulated to be compatible with its intended route of administration. Examples of routes of administration include parenteral, e.g., intravenous, intradermal, subcutaneous, intraperitoneal, intramuscular, oral (e.g., inhalation), transdermal (topical), and transmucosal administration.

[0577] The nucleic acid molecules of the invention can be inserted into expression constructs, e.g., viral vectors, retroviral vectors, expression cassettes, or plasmid viral vectors, e.g., using methods known in the art, including but not limited to those described in Xia et al., (2002), Supra. Expression constructs can be delivered to a subject by, for example, inhalation, orally, intravenous injection, local administration (see U.S. Pat. No. 5,328,470) or by stereotactic injection (see e.g., Chen et al. (1994), Proc. Natl. Acad. Sci. USA, 91, 3054-3057). The pharmaceutical preparation of the delivery vector can include the vector in an acceptable diluent, or can comprise a slow release matrix in which the delivery vehicle is imbedded. Alternatively, where the complete delivery vector can be produced intact from recombinant cells, e.g., retroviral vectors, the pharmaceutical preparation can include one or more cells which produce the gene delivery system.

[0578] The nucleic acid molecules of the invention can also include small hairpin RNAs (shRNAs), and expression constructs engineered to express shRNAs. Transcription of shRNAs is initiated at a polymerase III (pol III) promoter, and is thought to be terminated at position 2 of a 4-5-thymine transcription termination site. Upon expression, shRNAs are thought to fold into a stem-loop structure with 3′ UU-overhangs; subsequently, the ends of these shRNAs are processed, converting the shRNAs into siRNA-like molecules of about 21 nucleotides. Brummelkamp et al. (2002), Science, 296, 550-553; Lee et al, (2002). supra; Miyagishi and Taira (2002), Nature Biotechnol., 20, 497-500; Paddison et al. (2002), supra; Paul (2002), supra; Sui (2002) supra; Yu et al. (2002), supra.

[0579] The expression constructs may be any construct suitable for use in the appropriate expression system and include, but are not limited to retroviral vectors, linear expression cassettes, plasmids and viral or virally-derived vectors, as known in the art. Such expression constructs may include one or more inducible promoters, RNA Pol III promoter systems such as U6 snRNA promoters or H1 RNA polymerase III promoters, or other promoters known in the art. The constructs can include one or both strands of the siRNA. Expression constructs expressing both strands can also include loop structures linking both strands, or each strand can be separately transcribed from separate promoters within the same construct. Each strand can also be transcribed from a separate expression construct, Tuschl (2002), Supra.

[0580] In certain embodiments, a composition that includes a compound of the invention can be delivered to the lungs of a subject by a variety of routes. Exemplary routes include intratracheal or nasal delivery. The composition can also be delivered systemically, e.g., by intravenous, subcutaneous or intramuscular injection.

[0581] For example, compositions can include one or more species of a compound of the invention and a pharmaceutically acceptable carrier. The pharmaceutical compositions of the present invention may be administered in a number of ways depending upon whether local or systemic treatment is desired and upon the area to be treated.

[0582] As used herein “intratracheal administration” refers to the direct administration to the lung through the trachea. Intratracheal administration includes, but is not limited to, intratracheal inhalation and intratracheal instillation. Intratracheal administration (IT) is non-invasive and can be used in the field. Both the chemical architectures of the siRNAs and routes of administration might have benefits in different clinical contexts and disease stages. The chemical architectures optimal for different routes of administration is different. For example, DCA-conjugated siRNAs or divalent siRNAs can be effective for delivery of siRNA to the lung.

[0583] In one embodiment, divalent siRNAs are delivered to lung tissues. A variety of lung delivery systems can be employed to accomplish delivery to the lung tissues, for example, but not limited to, direct intrathecal instillation, or by using a nebulizer. Formulations in which the siRNA can be delivered are, for example, but not limited to, dry powder, direct powder, vapor droplets, etc.

[0584] It will be readily apparent to those skilled in the art that other suitable modifications and adaptations of the methods described herein may be made using suitable equivalents without departing from the scope of the embodiments disclosed herein. Having now described certain embodiments in detail, the same will be more clearly understood by reference to the following example, which is included for purposes of illustration only and is not intended to be limiting.

### EXAMPLES

### Example 1. In Vitro Identification of SARS-CoV-2 Targeting Sequences

[0585] Hyper functional siRNAs targeting all 9 genes (regions) of SARS-CoV2 were identified. A combination of bioinformatic approaches were employed to identify regions of conservation (based on 718 patients isolates) in combination with features essential for RISC entry and tolerance of chemical modifications. Over 100 chemically optimized compounds were synthesized, and reporter systems developed to test these compounds in cells, screened at 1.5 μM concentration. Selected hits were further screened in dose response studies, and at least two lead compounds were identified per gene with IC₅₀ values <20 nM.

[0586] Target sequences were derived from the severe acute respiratory syndrome coronavirus 2 (SARS CoV-2) isolate Wuhan-Hu-1 (NCBI accession: NC_045512). Fully chemically modified and conjugated oligonucleotides targeting SARS-CoV-2 and the human host receptors of SARS-CoV2 could potentially prevent and treat viral infections from viruses within the family Coronaviridiae.

[0587] Nine SARS-CoV-2 transcripts were selected for knockdown: the genes coding for the four major structural proteins spike surface glycoprotein (S), small envelope protein (E), matrix protein (M), and nucleocapsid protein (N), as well as genes coding for ppla, pplab, which make up the 16 non-structural proteins of SARS-CoV-2, and genes coding for the accessory proteins 3a, 8b, 7a (FIG. 1). Table 4 shows the full-length sequence of the SARS-CoV-2 genome, Table 5 the sequences of the SARS-CoV-2 genes. FIG. 2 depicts a diagram of siRNA and antisense oligonucleotides (ASOs) target positions on encoded proteins in the SARS-CoV-2 genome. siRNAs were designed to target nine genes encoding SARS-CoV-2 proteins: orfla, orflab, spike surface glycoprotein (S), small envelope protein (E), matrix protein (M), nucleocapsid protein (N), and accessory proteins 3a, 8b, 7a. Grey arrows indicate siRNA and ASO target positions. Inset in FIG. 2 shows a detailed view of siRNA target positions on genes in the 3′ region of the genome.

TABLE 4
SARS-CoV2 genomic sequence (NCBI Accession Number
NC 045512)

SARS-CoV2 genome sequence
ATTAAAGGTTTATACCTTCCCAGGTAACAAACCAACCAACTTTCGATCTC
TTGTAGATCTGTTCTCTAAACGAACTTTAAAATCTGTGTGGCTGTCACTC
GGCTGCATGCTTAGTGCACTCACGCAGTATAATTAATAACTAATTACTGT
CGTTGACAGGACACGAGTAACTCGTCTATCTTCTGCAGGCTGCTTACGGT
TTCGTCCGTGTTGCAGCCGATCATCAGCACATCTAGGTTTCGTCCGGGTG
TGACCGAAAGGTAAGATGGAGAGCCTTGTCCCTGGTTTCAACGAGAAAAC
ACACGTCCAACTCAGTTTGCCTGTTTTACAGGTTCGCGACGTGCTCGTAC
GTGGCTTTGGAGACTCCGTGGAGGAGGTCTTATCAGAGGCACGTCAACAT
CTTAAAGATGGCACTTGTGGCTTAGTAGAAGTTGAAAAAGGCGTTTTGCC
TCAACTTGAACAGCCCTATGTGTTCATCAAACGTTCGGATGCTCGAACTG
CACCTCATGGTCATGTTATGGTTGAGCTGGTAGCAGAACTCGAAGGCATT
CAGTACGGTCGTAGTGGTGAGACACTTGGTGTCCTTGTCCCTCATGTGGG
CGAAATACCAGTGGCTTACCGCAAGGTTCTTCTTCGTAAGAACGGTAATA
AAGGAGCTGGTGGCCATAGTTACGGCGCCGATCTAAAGTCATTTGACTTA
GGCGACGAGCTTGGCACTGATCCTTATGAAGATTTTCAAGAAAACTGGAA
CACTAAACATAGCAGTGGTGTTACCCGTGAACTCATGCGTGAGCTTAACG
GAGGGGCATACACTCGCTATGTCGATAACAACTTCTGTGGCCCTGATGGC
TACCCTCTTGAGTGCATTAAAGACCTTCTAGCACGTGCTGGTAAAGCTTC
ATGCACTTTGTCCGAACAACTGGACTTTATTGACACTAAGAGGGGTGTAT
ACTGCTGCCGTGAACATGAGCATGAAATTGCTTGGTACACGGAACGTTCT
GAAAAGAGCTATGAATTGCAGACACCTTTTGAAATTAAATTGGCAAAGAA
ATTTGACACCTTCAATGGGGAATGTCCAAATTTTGTATTTCCCTTAAATT
CCATAATCAAGACTATTCAACCAAGGGTTGAAAAGAAAAAGCTTGATGGC
TTTATGGGTAGAATTCGATCTGTCTATCCAGTTGCGTCACCAAATGAATG
CAACCAAATGTGCCTTTCAACTCTCATGAAGTGTGATCATTGTGGTGAAA
CTTCATGGCAGACGGGCGATTTTGTTAAAGCCACTTGCGAATTTTGTGGC
ACTGAGAATTTGACTAAAGAAGGTGCCACTACTTGTGGTTACTTACCCCA
AAATGCTGTTGTTAAAATTTATTGTCCAGCATGTCACAATTCAGAAGTAG
GACCTGAGCATAGTCTTGCCGAATACCATAATGAATCTGGCTTGAAAACC
ATTCTTCGTAAGGGTGGTCGCACTATTGCCTTTGGAGGCTGTGTGTTCTC
TTATGTTGGTTGCCATAACAAGTGTGCCTATTGGGTTCCACGTGCTAGCG
CTAACATAGGTTGTAACCATACAGGTGTTGTTGGAGAAGGTTCCGAAGGT
CTTAATGACAACCTTCTTGAAATACTCCAAAAAGAGAAAGTCAACATCAA
TATTGTTGGTGACTTTAAACTTAATGAAGAGATCGCCATTATTTTGGCAT
CTTTTTCTGCTTCCACAAGTGCTTTTGTGGAAACTGTGAAAGGTTTGGAT
TATAAAGCATTCAAACAAATTGTTGAATCCTGTGGTAATTTTAAAGTTAC
AAAAGGAAAAGCTAAAAAAGGTGCCTGGAATATTGGTGAACAGAAATCAA
TACTGAGTCCTCTTTATGCATTTGCATCAGAGGCTGCTCGTGTTGTACGA
TCAATTTTCTCCCGCACTCTTGAAACTGCTCAAAATTCTGTGCGTGTTTT
ACAGAAGGCCGCTATAACAATACTAGATGGAATTTCACAGTATTCACTGA
GACTCATTGATGCTATGATGTTCACATCTGATTTGGCTACTAACAATCTA
GTTGTAATGGCCTACATTACAGGTGGTGTTGTTCAGTTGACTTCGCAGTG
GCTAACTAACATCTTTGGCACTGTTTATGAAAAACTCAAACCCGTCCTTG
ATTGGCTTGAAGAGAAGTTTAAGGAAGGTGTAGAGTTTCTTAGAGACGGT
TGGGAAATTGTTAAATTTATCTCAACCTGTGCTTGTGAAATTGTCGGTGG
ACAAATTGTCACCTGTGCAAAGGAAATTAAGGAGAGTGTTCAGACATTCT
TTAAGCTTGTAAATAAATTTTTGGCTTTGTGTGCTGACTCTATCATTATT
GGTGGAGCTAAACTTAAAGCCTTGAATTTAGGTGAAACATTTGTCACGCA
CTCAAAGGGATTGTACAGAAAGTGTGTTAAATCCAGAGAAGAAACTGGCC
TACTCATGCCTCTAAAAGCCCCAAAAGAAATTATCTTCTTAGAGGGAGAA
ACACTTCCCACAGAAGTGTTAACAGAGGAAGTTGTCTTGAAAACTGGTGA
TTTACAACCATTAGAACAACCTACTAGTGAAGCTGTTGAAGCTCCATTGG
TTGGTACACCAGTTTGTATTAACGGGCTTATGTTGCTCGAAATCAAAGAC
ACAGAAAAGTACTGTGCCCTTGCACCTAATATGATGGTAACAAACAATAC
CTTCACACTCAAAGGCGGTGCACCAACAAAGGTTACTTTTGGTGATGACA
CTGTGATAGAAGTGCAAGGTTACAAGAGTGTGAATATCACTTTTGAACTT
GATGAAAGGATTGATAAAGTACTTAATGAGAAGTGCTCTGCCTATACAGT
TGAACTCGGTACAGAAGTAAATGAGTTCGCCTGTGTTGTGGCAGATGCTG
TCATAAAAACTTTGCAACCAGTATCTGAATTACTTACACCACTGGGCATT
GATTTAGATGAGTGGAGTATGGCTACATACTACTTATTTGATGAGTCTGG
TGAGTTTAAATTGGCTTCACATATGTATTGTTCTTTCTACCCTCCAGATG
AGGATGAAGAAGAAGGTGATTGTGAAGAAGAAGAGTTTGAGCCATCAACT
CAATATGAGTATGGTACTGAAGATGATTACCAAGGTAAACCTTTGGAATT
TGGTGCCACTTCTGCTGCTCTTCAACCTGAAGAAGAGCAAGAAGAAGATT
GGTTAGATGATGATAGTCAACAAACTGTTGGTCAACAAGACGGCAGTGAG
GACAATCAGACAACTACTATTCAAACAATTGTTGAGGTTCAACCTCAATT
AGAGATGGAACTTACACCAGTTGTTCAGACTATTGAAGTGAATAGTTTTA
GTGGTTATTTAAAACTTACTGACAATGTATACATTAAAAATGCAGACATT
GTGGAAGAAGCTAAAAAGGTAAAACCAACAGTGGTTGTTAATGCAGCCAA
TGTTTACCTTAAACATGGAGGAGGTGTTGCAGGAGCCTTAAATAAGGCTA
CTAACAATGCCATGCAAGTTGAATCTGATGATTACATAGCTACTAATGGA
CCACTTAAAGTGGGTGGTAGTTGTGTTTTAAGCGGACACAATCTTGCTAA
ACACTGTCTTCATGTTGTCGGCCCAAATGTTAACAAAGGTGAAGACATTC
AACTTCTTAAGAGTGCTTATGAAAATTTTAATCAGCACGAAGTTCTACTT
GCACCATTATTATCAGCTGGTATTTTTGGTGCTGACCCTATACATTCTTT
AAGAGTTTGTGTAGATACTGTTCGCACAAATGTCTACTTAGCTGTCTTTG
ATAAAAATCTCTATGACAAACTTGTTTCAAGCTTTTTGGAAATGAAGAGT
GAAAAGCAAGTTGAACAAAAGATCGCTGAGATTCCTAAAGAGGAAGTTAA
GCCATTTATAACTGAAAGTAAACCTTCAGTTGAACAGAGAAAACAAGATG
ATAAGAAAATCAAAGCTTGTGTTGAAGAAGTTACAACAACTCTGGAAGAA
ACTAAGTTCCTCACAGAAAACTTGTTACTTTATATTGACATTAATGGCAA
TCTTCATCCAGATTCTGCCACTCTTGTTAGTGACATTGACATCACTTTCT
TAAAGAAAGATGCTCCATATATAGTGGGTGATGTTGTTCAAGAGGGTGTT
TTAACTGCTGTGGTTATACCTACTAAAAAGGCTGGTGGCACTACTGAAAT
GCTAGCGAAAGCTTTGAGAAAAGTGCCAACAGACAATTATATAACCACTT
ACCCGGGTCAGGGTTTAAATGGTTACACTGTAGAGGAGGCAAAGACAGTG
CTTAAAAAGTGTAAAAGTGCCTTTTACATTCTACCATCTATTATCTCTAA
TGAGAAGCAAGAAATTCTTGGAACTGTTTCTTGGAATTTGCGAGAAATGC
TTGCACATGCAGAAGAAACACGCAAATTAATGCCTGTCTGTGTGGAAACT
AAAGCCATAGTTTCAACTATACAGCGTAAATATAAGGGTATTAAAATACA
AGAGGGTGTGGTTGATTATGGTGCTAGATTTTACTTTTACACCAGTAAAA
CAACTGTAGCGTCACTTATCAACACACTTAACGATCTAAATGAAACTCTT
GTTACAATGCCACTTGGCTATGTAACACATGGCTTAAATTTGGAAGAAGC
TGCTCGGTATATGAGATCTCTCAAAGTGCCAGCTACAGTTTCTGTTTCTT
CACCTGATGCTGTTACAGCGTATAATGGTTATCTTACTTCTTCTTCTAAA
ACACCTGAAGAACATTTTATTGAAACCATCTCACTTGCTGGTTCCTATAA
AGATTGGTCCTATTCTGGACAATCTACACAACTAGGTATAGAATTTCTTA
AGAGAGGTGATAAAAGTGTATATTACACTAGTAATCCTACCACATTCCAC
CTAGATGGTGAAGTTATCACCTTTGACAATCTTAAGACACTTCTTTCTTT
GAGAGAAGTGAGGACTATTAAGGTGTTTACAACAGTAGACAACATTAACC
TCCACACGCAAGTTGTGGACATGTCAATGACATATGGACAACAGTTTGGT
CCAACTTATTTGGATGGAGCTGATGTTACTAAAATAAAACCTCATAATTC
ACATGAAGGTAAAACATTTTATGTTTTACCTAATGATGACACTCTACGTG
TTGAGGCTTTTGAGTACTACCACACAACTGATCCTAGTTTTCTGGGTAGG
TACATGTCAGCATTAAATCACACTAAAAAGTGGAAATACCCACAAGTTAA
TGGTTTAACTTCTATTAAATGGGCAGATAACAACTGTTATCTTGCCACTG
CATTGTTAACACTCCAACAAATAGAGTTGAAGTTTAATCCACCTGCTCTA
CAAGATGCTTATTACAGAGCAAGGGCTGGTGAAGCTGCTAACTTTTGTGC
ACTTATCTTAGCCTACTGTAATAAGACAGTAGGTGAGTTAGGTGATGTTA
GAGAAACAATGAGTTACTTGTTTCAACATGCCAATTTAGATTCTTGCAAA
AGAGTCTTGAACGTGGTGTGTAAAACTTGTGGACAACAGCAGACAACCCT
TAAGGGTGTAGAAGCTGTTATGTACATGGGCACACTTTCTTATGAACAAT
TTAAGAAAGGTGTTCAGATACCTTGTACGTGTGGTAAACAAGCTACAAAA
TATCTAGTACAACAGGAGTCACCTTTTGTTATGATGTCAGCACCACCTGC
TCAGTATGAACTTAAGCATGGTACATTTACTTGTGCTAGTGAGTACACTG
GTAATTACCAGTGTGGTCACTATAAACATATAACTTCTAAAGAAACTTTG
TATTGCATAGACGGTGCTTTACTTACAAAGTCCTCAGAATACAAAGGTCC
TATTACGGATGTTTTCTACAAAGAAAACAGTTACACAACAACCATAAAAC
CAGTTACTTATAAATTGGATGGTGTTGTTTGTACAGAAATTGACCCTAAG
TTGGACAATTATTATAAGAAAGACAATTCTTATTTCACAGAGCAACCAAT
TGATCTTGTACCAAACCAACCATATCCAAACGCAAGCTTCGATAATTTTA
AGTTTGTATGTGATAATATCAAATTTGCTGATGATTTAAACCAGTTAACT
GGTTATAAGAAACCTGCTTCAAGAGAGCTTAAAGTTACATTTTTCCCTGA
CTTAAATGGTGATGTGGTGGCTATTGATTATAAACACTACACACCCTCTT
TTAAGAAAGGAGCTAAATTGTTACATAAACCTATTGTTTGGCATGTTAAC
AATGCAACTAATAAAGCCACGTATAAACCAAATACCTGGTGTATACGTTG
TCTTTGGAGCACAAAACCAGTTGAAACATCAAATTCGTTTGATGTACTGA
AGTCAGAGGACGCGCAGGGAATGGATAATCTTGCCTGCGAAGATCTAAAA
CCAGTCTCTGAAGAAGTAGTGGAAAATCCTACCATACAGAAAGACGTTCT
TGAGTGTAATGTGAAAACTACCGAAGTTGTAGGAGACATTATACTTAAAC
CAGCAAATAATAGTTTAAAAATTACAGAAGAGGTTGGCCACACAGATCTA
ATGGCTGCTTATGTAGACAATTCTAGTCTTACTATTAAGAAACCTAATGA
ATTATCTAGAGTATTAGGTTTGAAAACCCTTGCTACTCATGGTTTAGCTG
CTGTTAATAGTGTCCCTTGGGATACTATAGCTAATTATGCTAAGCCTTTT
CTTAACAAAGTTGTTAGTACAACTACTAACATAGTTACACGGTGTTTAAA
CCGTGTTTGTACTAATTATATGCCTTATTTCTTTACTTTATTGCTACAAT
TGTGTACTTTTACTAGAAGTACAAATTCTAGAATTAAAGCATCTATGCCG
ACTACTATAGCAAAGAATACTGTTAAGAGTGTCGGTAAATTTTGTCTAGA
GGCTTCATTTAATTATTTGAAGTCACCTAATTTTTCTAAACTGATAAATA
TTATAATTTGGTTTTTACTATTAAGTGTTTGCCTAGGTTCTTTAATCTAC
TCAACCGCTGCTTTAGGTGTTTTAATGTCTAATTTAGGCATGCCTTCTTA
CTGTACTGGTTACAGAGAAGGCTATTTGAACTCTACTAATGTCACTATTG
CAACCTACTGTACTGGTTCTATACCTTGTAGTGTTTGTCTTAGTGGTTTA
GATTCTTTAGACACCTATCCTTCTTTAGAAACTATACAAATTACCATTTC
ATCTTTTAAATGGGATTTAACTGCTTTTGGCTTAGTTGCAGAGTGGTTTT
TGGCATATATTCTTTTCACTAGGTTTTTCTATGTACTTGGATTGGCTGCA
ATCATGCAATTGTTTTTCAGCTATTTTGCAGTACATTTTATTAGTAATTC
TTGGCTTATGTGGTTAATAATTAATCTTGTACAAATGGCCCCGATTTCAG
CTATGGTTAGAATGTACATCTTCTTTGCATCATTTTATTATGTATGGAAA
AGTTATGTGCATGTTGTAGACGGTTGTAATTCATCAACTTGTATGATGTG
TTACAAACGTAATAGAGCAACAAGAGTCGAATGTACAACTATTGTTAATG
GTGTTAGAAGGTCCTTTTATGTCTATGCTAATGGAGGTAAAGGCTTTTGC
AAACTACACAATTGGAATTGTGTTAATTGTGATACATTCTGTGCTGGTAG
TACATTTATTAGTGATGAAGTTGCGAGAGACTTGTCACTACAGTTTAAAA
GACCAATAAATCCTACTGACCAGTCTTCTTACATCGTTGATAGTGTTACA
GTGAAGAATGGTTCCATCCATCTTTACTTTGATAAAGCTGGTCAAAAGAC
TTATGAAAGACATTCTCTCTCTCATTTTGTTAACTTAGACAACCTGAGAG
CTAATAACACTAAAGGTTCATTGCCTATTAATGTTATAGTTTTTGATGGT
AAATCAAAATGTGAAGAATCATCTGCAAAATCAGCGTCTGTTTACTACAG
TCAGCTTATGTGTCAACCTATACTGTTACTAGATCAGGCATTAGTGTCTG
ATGTTGGTGATAGTGCGGAAGTTGCAGTTAAAATGTTTGATGCTTACGTT
AATACGTTTTCATCAACTTTTAACGTACCAATGGAAAAACTCAAAACACT
AGTTGCAACTGCAGAAGCTGAACTTGCAAAGAATGTGTCCTTAGACAATG
TCTTATCTACTTTTATTTCAGCAGCTCGGCAAGGGTTTGTTGATTCAGAT
GTAGAAACTAAAGATGTTGTTGAATGTCTTAAATTGTCACATCAATCTGA
CATAGAAGTTACTGGCGATAGTTGTAATAACTATATGCTCACCTATAACA
AAGTTGAAAACATGACACCCCGTGACCTTGGTGCTTGTATTGACTGTAGT
GCGCGTCATATTAATGCGCAGGTAGCAAAAAGTCACAACATTGCTTTGAT
ATGGAACGTTAAAGATTTCATGTCATTGTCTGAACAACTACGAAAACAAA
TACGTAGTGCTGCTAAAAAGAATAACTTACCTTTTAAGTTGACATGTGCA
ACTACTAGACAAGTTGTTAATGTTGTAACAACAAAGATAGCACTTAAGGG
TGGTAAAATTGTTAATAATTGGTTGAAGCAGTTAATTAAAGTTACACTTG
TGTTCCTTTTTGTTGCTGCTATTTTCTATTTAATAACACCTGTTCATGTC
ATGTCTAAACATACTGACTTTTCAAGTGAAATCATAGGATACAAGGCTAT
TGATGGTGGTGTCACTCGTGACATAGCATCTACAGATACTTGTTTTGCTA
ACAAACATGCTGATTTTGACACATGGTTTAGCCAGCGTGGTGGTAGTTAT
ACTAATGACAAAGCTTGCCCATTGATTGCTGCAGTCATAACAAGAGAAGT
GGGTTTTGTCGTGCCTGGTTTGCCTGGCACGATATTACGCACAACTAATG
GTGACTTTTTGCATTTCTTACCTAGAGTTTTTAGTGCAGTTGGTAACATC
TGTTACACACCATCAAAACTTATAGAGTACACTGACTTTGCAACATCAGC
TTGTGTTTTGGCTGCTGAATGTACAATTTTTAAAGATGCTTCTGGTAAGC
CAGTACCATATTGTTATGATACCAATGTACTAGAAGGTTCTGTTGCTTAT
GAAAGTTTACGCCCTGACACACGTTATGTGCTCATGGATGGCTCTATTAT
TCAATTTCCTAACACCTACCTTGAAGGTTCTGTTAGAGTGGTAACAACTT
TTGATTCTGAGTACTGTAGGCACGGCACTTGTGAAAGATCAGAAGCTGGT
GTTTGTGTATCTACTAGTGGTAGATGGGTACTTAACAATGATTATTACAG
ATCTTTACCAGGAGTTTTCTGTGGTGTAGATGCTGTAAATTTACTTACTA
ATATGTTTACACCACTAATTCAACCTATTGGTGCTTTGGACATATCAGCA
TCTATAGTAGCTGGTGGTATTGTAGCTATCGTAGTAACATGCCTTGCCTA
CTATTTTATGAGGTTTAGAAGAGCTTTTGGTGAATACAGTCATGTAGTTG
CCTTTAATACTTTACTATTCCTTATGTCATTCACTGTACTCTGTTTAACA
CCAGTTTACTCATTCTTACCTGGTGTTTATTCTGTTATTTACTTGTACTT
GACATTTTATCTTACTAATGATGTTTCTTTTTTAGCACATATTCAGTGGA
TGGTTATGTTCACACCTTTAGTACCTTTCTGGATAACAATTGCTTATATC
ATTTGTATTTCCACAAAGCATTTCTATTGGTTCTTTAGTAATTACCTAAA
GAGACGTGTAGTCTTTAATGGTGTTTCCTTTAGTACTTTTGAAGAAGCTG
CGCTGTGCACCTTTTTGTTAAATAAAGAAATGTATCTAAAGTTGCGTAGT
GATGTGCTATTACCTCTTACGCAATATAATAGATACTTAGCTCTTTATAA
TAAGTACAAGTATTTTAGTGGAGCAATGGATACAACTAGCTACAGAGAAG
CTGCTTGTTGTCATCTCGCAAAGGCTCTCAATGACTTCAGTAACTCAGGT
TCTGATGTTCTTTACCAACCACCACAAACCTCTATCACCTCAGCTGTTTT
GCAGAGTGGTTTTAGAAAAATGGCATTCCCATCTGGTAAAGTTGAGGGTT
GTATGGTACAAGTAACTTGTGGTACAACTACACTTAACGGTCTTTGGCTT
GATGACGTAGTTTACTGTCCAAGACATGTGATCTGCACCTCTGAAGACAT
GCTTAACCCTAATTATGAAGATTTACTCATTCGTAAGTCTAATCATAATT
TCTTGGTACAGGCTGGTAATGTTCAACTCAGGGTTATTGGACATTCTATG
CAAAATTGTGTACTTAAGCTTAAGGTTGATACAGCCAATCCTAAGACACC
TAAGTATAAGTTTGTTCGCATTCAACCAGGACAGACTTTTTCAGTGTTAG
CTTGTTACAATGGTTCACCATCTGGTGTTTACCAATGTGCTATGAGGCCC
AATTTCACTATTAAGGGTTCATTCCTTAATGGTTCATGTGGTAGTGTTGG
TTTTAACATAGATTATGACTGTGTCTCTTTTTGTTACATGCACCATATGG
AATTACCAACTGGAGTTCATGCTGGCACAGACTTAGAAGGTAACTTTTAT
GGACCTTTTGTTGACAGGCAAACAGCACAAGCAGCTGGTACGGACACAAC
TATTACAGTTAATGTTTTAGCTTGGTTGTACGCTGCTGTTATAAATGGAG
ACAGGTGGTTTCTCAATCGATTTACCACAACTCTTAATGACTTTAACCTT
GTGGCTATGAAGTACAATTATGAACCTCTAACACAAGACCATGTTGACAT
ACTAGGACCTCTTTCTGCTCAAACTGGAATTGCCGTTTTAGATATGTGTG
CTTCATTAAAAGAATTACTGCAAAATGGTATGAATGGACGTACCATATTG
GGTAGTGCTTTATTAGAAGATGAATTTACACCTTTTGATGTTGTTAGACA
ATGCTCAGGTGTTACTTTCCAAAGTGCAGTGAAAAGAACAATCAAGGGTA
CACACCACTGGTTGTTACTCACAATTTTGACTTCACTTTTAGTTTTAGTC
CAGAGTACTCAATGGTCTTTGTTCTTTTTTTTGTATGAAAATGCCTTTTT
ACCTTTTGCTATGGGTATTATTGCTATGTCTGCTTTTGCAATGATGTTTG
TCAAACATAAGCATGCATTTCTCTGTTTGTTTTTGTTACCTTCTCTTGCC
ACTGTAGCTTATTTTAATATGGTCTATATGCCTGCTAGTTGGGTGATGCG
TATTATGACATGGTTGGATATGGTTGATACTAGTTTGTCTGGTTTTAAGC
TAAAAGACTGTGTTATGTATGCATCAGCTGTAGTGTTACTAATCCTTATG
ACAGCAAGAACTGTGTATGATGATGGTGCTAGGAGAGTGTGGACACTTAT
GAATGTCTTGACACTCGTTTATAAAGTTTATTATGGTAATGCTTTAGATC
AAGCCATTTCCATGTGGGCTCTTATAATCTCTGTTACTTCTAACTACTCA
GGTGTAGTTACAACTGTCATGTTTTTGGCCAGAGGTATTGTTTTTATGTG
TGTTGAGTATTGCCCTATTTTCTTCATAACTGGTAATACACTTCAGTGTA
TAATGCTAGTTTATTGTTTCTTAGGCTATTTTTGTACTTGTTACTTTGGC
CTCTTTTGTTTACTCAACCGCTACTTTAGACTGACTCTTGGTGTTTATGA
TTACTTAGTTTCTACACAGGAGTTTAGATATATGAATTCACAGGGACTAC
TCCCACCCAAGAATAGCATAGATGCCTTCAAACTCAACATTAAATTGTTG
GGTGTTGGTGGCAAACCTTGTATCAAAGTAGCCACTGTACAGTCTAAAAT
GTCAGATGTAAAGTGCACATCAGTAGTCTTACTCTCAGTTTTGCAACAAC
TCAGAGTAGAATCATCATCTAAATTGTGGGCTCAATGTGTCCAGTTACAC
AATGACATTCTCTTAGCTAAAGATACTACTGAAGCCTTTGAAAAAATGGT
TTCACTACTTTCTGTTTTGCTTTCCATGCAGGGTGCTGTAGACATAAACA
AGCTTTGTGAAGAAATGCTGGACAACAGGGCAACCTTACAAGCTATAGCC
TCAGAGTTTAGTTCCCTTCCATCATATGCAGCTTTTGCTACTGCTCAAGA
AGCTTATGAGCAGGCTGTTGCTAATGGTGATTCTGAAGTTGTTCTTAAAA
AGTTGAAGAAGTCTTTGAATGTGGCTAAATCTGAATTTGACCGTGATGCA
GCCATGCAACGTAAGTTGGAAAAGATGGCTGATCAAGCTATGACCCAAAT
GTATAAACAGGCTAGATCTGAGGACAAGAGGGCAAAAGTTACTAGTGCTA
TGCAGACAATGCTTTTCACTATGCTTAGAAAGTTGGATAATGATGCACTC
AACAACATTATCAACAATGCAAGAGATGGTTGTGTTCCCTTGAACATAAT
ACCTCTTACAACAGCAGCCAAACTAATGGTTGTCATACCAGACTATAACA
CATATAAAAATACGTGTGATGGTACAACATTTACTTATGCATCAGCATTG
TGGGAAATCCAACAGGTTGTAGATGCAGATAGTAAAATTGTTCAACTTAG
TGAAATTAGTATGGACAATTCACCTAATTTAGCATGGCCTCTTATTGTAA
CAGCTTTAAGGGCCAATTCTGCTGTCAAATTACAGAATAATGAGCTTAGT
CCTGTTGCACTACGACAGATGTCTTGTGCTGCCGGTACTACACAAACTGC
TTGCACTGATGACAATGCGTTAGCTTACTACAACACAACAAAGGGAGGTA
GGTTTGTACTTGCACTGTTATCCGATTTACAGGATTTGAAATGGGCTAGA
TTCCCTAAGAGTGATGGAACTGGTACTATCTATACAGAACTGGAACCACC
TTGTAGGTTTGTTACAGACACACCTAAAGGTCCTAAAGTGAAGTATTTAT
ACTTTATTAAAGGATTAAACAACCTAAATAGAGGTATGGTACTTGGTAGT
TTAGCTGCCACAGTACGTCTACAAGCTGGTAATGCAACAGAAGTGCCTGC
CAATTCAACTGTATTATCTTTCTGTGCTTTTGCTGTAGATGCTGCTAAAG
CTTACAAAGATTATCTAGCTAGTGGGGGACAACCAATCACTAATTGTGTT
AAGATGTTGTGTACACACACTGGTACTGGTCAGGCAATAACAGTTACACC
GGAAGCCAATATGGATCAAGAATCCTTTGGTGGTGCATCGTGTTGTCTGT
ACTGCCGTTGCCACATAGATCATCCAAATCCTAAAGGATTTTGTGACTTA
AAAGGTAAGTATGTACAAATACCTACAACTTGTGCTAATGACCCTGTGGG
TTTTACACTTAAAAACACAGTCTGTACCGTCTGCGGTATGTGGAAAGGTT
ATGGCTGTAGTTGTGATCAACTCCGCGAACCCATGCTTCAGTCAGCTGAT
GCACAATCGTTTTTAAACGGGTTTGCGGTGTAAGTGCAGCCCGTCTTACA
CCGTGCGGCACAGGCACTAGTACTGATGTCGTATACAGGGCTTTTGACAT
CTACAATGATAAAGTAGCTGGTTTTGCTAAATTCCTAAAAACTAATTGTT
GTCGCTTCCAAGAAAAGGACGAAGATGACAATTTAATTGATTCTTACTTT
GTAGTTAAGAGACACACTTTCTCTAACTACCAACATGAAGAAACAATTTA
TAATTTACTTAAGGATTGTCCAGCTGTTGCTAAACATGACTTCTTTAAGT
TTAGAATAGACGGTGACATGGTACCACATATATCACGTCAACGTCTTACT
AAATACACAATGGCAGACCTCGTCTATGCTTTAAGGCATTTTGATGAAGG
TAATTGTGACACATTAAAAGAAATACTTGTCACATACAATTGTTGTGATG
ATGATTATTTCAATAAAAAGGACTGGTATGATTTTGTAGAAAACCCAGAT
ATATTACGCGTATACGCCAACTTAGGTGAACGTGTACGCCAAGCTTTGTT
AAAAACAGTACAATTCTGTGATGCCATGCGAAATGCTGGTATTGTTGGTG
TACTGACATTAGATAATCAAGATCTCAATGGTAACTGGTATGATTTCGGT
GATTTCATACAAACCACGCCAGGTAGTGGAGTTCCTGTTGTAGATTCTTA
TTATTCATTGTTAATGCCTATATTAACCTTGACCAGGGCTTTAACTGCAG
AGTCACATGTTGACACTGACTTAACAAAGCCTTACATTAAGTGGGATTTG
TTAAAATATGACTTCACGGAAGAGAGGTTAAAACTCTTTGACCGTTATTT
TAAATATTGGGATCAGACATACCACCCAAATTGTGTTAACTGTTTGGATG
ACAGATGCATTCTGCATTGTGCAAACTTTAATGTTTTATTCTCTACAGTG
TTCCCACCTACAAGTTTTGGACCACTAGTGAGAAAAATATTTGTTGATGG
TGTTCCATTTGTAGTTTCAACTGGATACCACTTCAGAGAGCTAGGTGTTG
TACATAATCAGGATGTAAACTTACATAGCTCTAGACTTAGTTTTAAGGAA
TTACTTGTGTATGCTGCTGACCCTGCTATGCACGCTGCTTCTGGTAATCT
ATTACTAGATAAACGCACTACGTGCTTTTCAGTAGCTGCACTTACTAACA
ATGTTGCTTTTCAAACTGTCAAACCCGGTAATTTTAACAAAGACTTCTAT
GACTTTGCTGTGTCTAAGGGTTTCTTTAAGGAAGGAAGTTCTGTTGAATT
AAAACACTTCTTCTTTGCTCAGGATGGTAATGCTGCTATCAGCGATTATG
ACTACTATCGTTATAATCTACCAACAATGTGTGATATCAGACAACTACTA
TTTGTAGTTGAAGTTGTTGATAAGTACTTTGATTGTTACGATGGTGGCTG
TATTAATGCTAACCAAGTCATCGTCAACAACCTAGACAAATCAGCTGGTT
TTCCATTTAATAAATGGGGTAAGGCTAGACTTTATTATGATTCAATGAGT
TATGAGGATCAAGATGCACTTTTCGCATATACAAAACGTAATGTCATCCC
TACTATAACTCAAATGAATCTTAAGTATGCCATTAGTGCAAAGAATAGAG
CTCGCACCGTAGCTGGTGTCTCTATCTGTAGTACTATGACCAATAGACAG
TTTCATCAAAAATTATTGAAATCAATAGCCGCCACTAGAGGAGCTACTGT
AGTAATTGGAACAAGCAAATTCTATGGTGGTTGGCACAACATGTTAAAAA
CTGTTTATAGTGATGTAGAAAACCCTCACCTTATGGGTTGGGATTATCCT
AAATGTGATAGAGCCATGCCTAACATGCTTAGAATTATGGCCTCACTTGT
TCTTGCTCGCAAACATACAACGTGTTGTAGCTTGTCACACCGTTTCTATA
GATTAGCTAATGAGTGTGCTCAAGTATTGAGTGAAATGGTCATGTGTGGC
GGTTCACTATATGTTAAACCAGGTGGAACCTCATCAGGAGATGCCACAAC
TGCTTATGCTAATAGTGTTTTTAACATTTGTCAAGCTGTCACGGCCAATG
TTAATGCACTTTTATCTACTGATGGTAACAAAATTGCCGATAAGTATGTC
CGCAATTTACAACACAGACTTTATGAGTGTCTCTATAGAAATAGAGATGT
TGACACAGACTTTGTGAATGAGTTTTACGCATATTTGCGTAAACATTTCT
CAATGATGATACTCTCTGACGATGCTGTTGTGTGTTTCAATAGCACTTAT
GCATCTCAAGGTCTAGTGGCTAGCATAAAGAACTTTAAGTCAGTTCTTTA
TTATCAAAACAATGTTTTTATGTCTGAAGCAAAATGTTGGACTGAGACTG
ACCTTACTAAAGGACCTCATGAATTTTGCTCTCAACATACAATGCTAGTT
AAACAGGGTGATGATTATGTGTACCTTCCTTACCCAGATCCATCAAGAAT
CCTAGGGGCCGGCTGTTTTGTAGATGATATCGTAAAAACAGATGGTACAC
TTATGATTGAACGGTTCGTGTCTTTAGCTATAGATGCTTACCCACTTACT
AAACATCCTAATCAGGAGTATGCTGATGTCTTTCATTTGTACTTACAATA
CATAAGAAAGCTACATGATGAGTTAACAGGACACATGTTAGACATGTATT
CTGTTATGCTTACTAATGATAACACTTCAAGGTATTGGGAACCTGAGTTT
TATGAGGCTATGTACACACCGCATACAGTCTTACAGGCTGTTGGGGCTTG
TGTTCTTTGCAATTCACAGACTTCATTAAGATGTGGTGCTTGCATACGTA
GACCATTCTTATGTTGTAAATGCTGTTACGACCATGTCATATCAACATCA
CATAAATTAGTCTTGTCTGTTAATCCGTATGTTTGCAATGCTCCAGGTTG
TGATGTCACAGATGTGACTCAACTTTACTTAGGAGGTATGAGCTATTATT
GTAAATCACATAAACCACCCATTAGTTTTCCATTGTGTGCTAATGGACAA
GTTTTTGGTTTATATAAAAATACATGTGTTGGTAGCGATAATGTTACTGA
CTTTAATGCAATTGCAACATGTGACTGGACAAATGCTGGTGATTACATTT
TAGCTAACACCTGTACTGAAAGACTCAAGCTTTTTGCAGCAGAAACGCTC
AAAGCTACTGAGGAGACATTTAAACTGTCTTATGGTATTGCTACTGTACG
TGAAGTGCTGTCTGACAGAGAATTACATCTTTCATGGGAAGTTGGTAAAC
CTAGACCACCACTTAACCGAAATTATGTCTTTACTGGTTATCGTGTAACT
AAAAACAGTAAAGTACAAATAGGAGAGTACACCTTTGAAAAAGGTGACTA
TGGTGATGCTGTTGTTTACCGAGGTACAACAACTTACAAATTAAATGTTG
GTGATTATTTTGTGCTGACATCACATACAGTAATGCCATTAAGTGCACCT
ACACTAGTGCCACAAGAGCACTATGTTAGAATTACTGGCTTATACCCAAC
ACTCAATATCTCAGATGAGTTTTCTAGCAATGTTGCAAATTATCAAAAGG
TTGGTATGCAAAAGTATTCTACACTCCAGGGACCACCTGGTACTGGTAAG
AGTCATTTTGCTATTGGCCTAGCTCTCTACTACCCTTCTGCTCGCATAGT
GTATACAGCTTGCTCTCATGCCGCTGTTGATGCACTATGTGAGAAGGCAT
TAAAATATTTGCCTATAGATAAATGTAGTAGAATTATACCTGCACGTGCT
CGTGTAGAGTGTTTTGATAAATTCAAAGTGAATTCAACATTAGAACAGTA
TGTCTTTTGTACTGTAAATGCATTGCCTGAGACGACAGCAGATATAGTTG
TCTTTGATGAAATTTCAATGGCCACAAATTATGATTTGAGTGTTGTCAAT
GCCAGATTACGTGCTAAGCACTATGTGTACATTGGCGACCCTGCTCAATT
ACCTGCACCACGCACATTGCTAACTAAGGGCACACTAGAACCAGAATATT
TCAATTCAGTGTGTAGACTTATGAAAACTATAGGTCCAGACATGTTCCTC
GGAACTTGTCGGCGTTGTCCTGCTGAAATTGTTGACACTGTGAGTGCTTT
GGTTTATGATAATAAGCTTAAAGCACATAAAGACAAATCAGCTCAATGCT
TTAAAATGTTTTATAAGGGTGTTATCACGCATGATGTTTCATCTGCAATT
AACAGGCCACAAATAGGCGTGGTAAGAGAATTCCTTACACGTAACCCTGC
TTGGAGAAAAGCTGTCTTTATTTCACCTTATAATTCACAGAATGCTGTAG
CCTCAAAGATTTTGGGACTACCAACTCAAACTGTTGATTCATCACAGGGC
TCAGAATATGACTATGTCATATTCACTCAAACCACTGAAACAGCTCACTC
TTGTAATGTAAACAGATTTAATGTTGCTATTACCAGAGCAAAAGTAGGCA
TACTTTGCATAATGTCTGATAGAGACCTTTATGACAAGTTGCAATTTACA
AGTCTTGAAATTCCACGTAGGAATGTGGCAACTTTACAAGCTGAAAATGT
AACAGGACTCTTTAAAGATTGTAGTAAGGTAATCACTGGGTTACATCCTA
CACAGGCACCTACACACCTCAGTGTTGACACTAAATTCAAAACTGAAGGT
TTATGTGTTGACATACCTGGCATACCTAAGGACATGACCTATAGAAGACT
CATCTCTATGATGGGTTTTAAAATGAATTATCAAGTTAATGGTTACCCTA
ACATGTTTATCACCCGCGAAGAAGCTATAAGACATGTACGTGCATGGATT
GGCTTCGATGTCGAGGGGTGTCATGCTACTAGAGAAGCTGTTGGTACCAA
TTTACCTTTACAGCTAGGTTTTTCTACAGGTGTTAACCTAGTTGCTGTAC
CTACAGGTTATGTTGATACACCTAATAATACAGATTTTTCCAGAGTTAGT
GCTAAACCACCGCCTGGAGATCAATTTAAACACCTCATACCACTTATGTA
CAAAGGACTTCCTTGGAATGTAGTGCGTATAAAGATTGTACAAATGTTAA
GTGACACACTTAAAAATCTCTCTGACAGAGTCGTATTTGTCTTATGGGCA
CATGGCTTTGAGTTGACATCTATGAAGTATTTTGTGAAAATAGGACCTGA
GCGCACCTGTTGTCTATGTGATAGACGTGCCACATGCTTTTCCACTGCTT
CAGACACTTATGCCTGTTGGCATCATTCTATTGGATTTGATTACGTCTAT
AATCCGTTTATGATTGATGTTCAACAATGGGGTTTTACAGGTAACCTACA
AAGCAACCATGATCTGTATTGTCAAGTCCATGGTAATGCACATGTAGCTA
GTTGTGATGCAATCATGACTAGGTGTCTAGCTGTCCACGAGTGCTTTGTT
AAGCGTGTTGACTGGACTATTGAATATCCTATAATTGGTGATGAACTGAA
GATTAATGCGGCTTGTAGAAAGGTTCAACACATGGTTGTTAAAGCTGCAT
TATTAGCAGACAAATTCCCAGTTCTTCACGACATTGGTAACCCTAAAGCT
ATTAAGTGTGTACCTCAAGCTGATGTAGAATGGAAGTTCTATGATGCACA
GCCTTGTAGTGACAAAGCTTATAAAATAGAAGAATTATTCTATTCTTATG
CCACACATTCTGACAAATTCACAGATGGTGTATGCCTATTTTGGAATTGC
AATGTCGATAGATATCCTGCTAATTCCATTGTTTGTAGATTTGACACTAG
AGTGCTATCTAACCTTAACTTGCCTGGTTGTGATGGTGGCAGTTTGTATG
TAAATAAACATGCATTCCACACACCAGCTTTTGATAAAAGTGCTTTTGTT
AATTTAAAACAATTACCATTTTTCTATTACTCTGACAGTCCATGTGAGTC
TCATGGAAAACAAGTAGTGTCAGATATAGATTATGTACCACTAAAGTCTG
CTACGTGTATAACACGTTGCAATTTAGGTGGTGCTGTCTGTAGACATCAT
GCTAATGAGTACAGATTGTATCTCGATGCTTATAACATGATGATCTCAGC
TGGCTTTAGCTTGTGGGTTTACAAACAATTTGATACTTATAACCTCTGGA
ACACTTTTACAAGACTTCAGAGTTTAGAAAATGTGGCTTTTAATGTTGTA
AATAAGGGACACTTTGATGGACAACAGGGTGAAGTACCAGTTTCTATCAT
TAATAACACTGTTTACACAAAAGTTGATGGTGTTGATGTAGAATTGTTTG
AAAATAAAACAACATTACCTGTTAATGTAGCATTTGAGCTTTGGGCTAAG
CGCAACATTAAACCAGTACCAGAGGTGAAAATACTCAATAATTTGGGTGT
GGACATTGCTGCTAATACTGTGATCTGGGACTACAAAAGAGATGCTCCAG
CACATATATCTACTATTGGTGTTTGTTCTATGACTGACATAGCCAAGAAA
CCAACTGAAACGATTTGTGCACCACTCACTGTCTTTTTTGATGGTAGAGT
TGATGGTCAAGTAGACTTATTTAGAAATGCCCGTAATGGTGTTCTTATTA
CAGAAGGTAGTGTTAAAGGTTTACAACCATCTGTAGGTCCCAAACAAGCT
AGTCTTAATGGAGTCACATTAATTGGAGAAGCCGTAAAAACACAGTTCAA
TTATTATAAGAAAGTTGATGGTGTTGTCCAACAATTACCTGAAACTTACT
TTACTCAGAGTAGAAATTTACAAGAATTTAAACCCAGGAGTCAAATGGAA
ATTGATTTCTTAGAATTAGCTATGGATGAATTCATTGAACGGTATAAATT
AGAAGGCTATGCCTTCGAACATATCGTTTATGGAGATTTTAGTCATAGTC
AGTTAGGTGGTTTACATCTACTGATTGGACTAGCTAAACGTTTTAAGGAA
TCACCTTTTGAATTAGAAGATTTTATTCCTATGGACAGTACAGTTAAAAA
CTATTTCATAACAGATGCGCAAACAGGTTCATCTAAGTGTGTGTGTTCTG
TTATTGATTTATTACTTGATGATTTTGTTGAAATAATAAAATCCCAAGAT
TTATCTGTAGTTTCTAAGGTTGTCAAAGTGACTATTGACTATACAGAAAT
TTCATTTATGCTTTGGTGTAAAGATGGCCATGTAGAAACATTTTACCCAA
AATTACAATCTAGTCAAGCGTGGCAACCGGGTGTTGCTATGCCTAATCTT
TACAAAATGCAAAGAATGCTATTAGAAAAGTGTGACCTTCAAAATTATGG
TGATAGTGCAACATTACCTAAAGGCATAATGATGAATGTCGCAAAATATA
CTCAACTGTGTCAATATTTAAACACATTAACATTAGCTGTACCCTATAAT
ATGAGAGTTATACATTTTGGTGCTGGTTCTGATAAAGGAGTTGCACCAGG
TACAGCTGTTTTAAGACAGTGGTTGCCTACGGGTACGCTGCTTGTCGATT
CAGATCTTAATGACTTTGTCTCTGATGCAGATTCAACTTTGATTGGTGAT
TGTGCAACTGTACATACAGCTAATAAATGGGATCTCATTATTAGTGATAT
GTACGACCCTAAGACTAAAAATGTTACAAAAGAAAATGACTCTAAAGAGG
GTTTTTTCACTTACATTTGTGGGTTTATACAACAAAAGCTAGCTCTTGGA
GGTTCCGTGGCTATAAAGATAACAGAACATTCTTGGAATGCTGATCTTTA
TAAGCTCATGGGACACTTCGCATGGTGGACAGCCTTTGTTACTAATGTGA
ATGCGTCATCATCTGAAGCATTTTTAATTGGATGTAATTATCTTGGCAAA
CCACGCGAACAAATAGATGGTTATGTCATGCATGCAAATTACATATTTTG
GAGGAATACAAATCCAATTCAGTTGTCTTCCTATTCTTTATTTGACATGA
GTAAATTTCCCCTTAAATTAAGGGGTACTGCTGTTATGTCTTTAAAAGAA
GGTCAAATCAATGATATGATTTTATCTCTTCTTAGTAAAGGTAGACTTAT
AATTAGAGAAAACAACAGAGTTGTTATTTCTAGTGATGTTCTTGTTAACA
ACTAAACGAACAATGTTTGTTTTTCTTGTTTTATTGCCACTAGTCTCTAG
TCAGTGTGTTAATCTTACAACCAGAACTCAATTACCCCCTGCATACACTA
ATTCTTTCACACGTGGTGTTTATTACCCTGACAAAGTTTTCAGATCCTCA
GTTTTACATTCAACTCAGGACTTGTTCTTACCTTTCTTTTCCAATGTTAC
TTGGTTCCATGCTATACATGTCTCTGGGACCAATGGTACTAAGAGGTTTG
ATAACCCTGTCCTACCATTTAATGATGGTGTTTATTTTGCTTCCACTGAG
AAGTCTAACATAATAAGAGGCTGGATTTTTGGTACTACTTTAGATTCGAA
GACCCAGTCCCTACTTATTGTTAATAACGCTACTAATGTTGTTATTAAAG
TCTGTGAATTTCAATTTTGTAATGATCCATTTTTGGGTGTTTATTACCAC
AAAAACAACAAAAGTTGGATGGAAAGTGAGTTCAGAGTTTATTCTAGTGC
GAATAATTGCACTTTTGAATATGTCTCTCAGCCTTTTCTTATGGACCTTG
AAGGAAAACAGGGTAATTTCAAAAATCTTAGGGAATTTGTGTTTAAGAAT
ATTGATGGTTATTTTAAAATATATTCTAAGCACACGCCTATTAATTTAGT
GCGTGATCTCCCTCAGGGTTTTTCGGCTTTAGAACCATTGGTAGATTTGC
CAATAGGTATTAACATCACTAGGTTTCAAACTTTACTTGCTTTACATAGA
AGTTATTTGACTCCTGGTGATTCTTCTTCAGGTTGGACAGCTGGTGCTGC
AGCTTATTATGTGGGTTATCTTCAACCTAGGACTTTTCTATTAAAATATA
ATGAAAATGGAACCATTACAGATGCTGTAGACTGTGCACTTGACCCTCTC
TCAGAAACAAAGTGTACGTTGAAATCCTTCACTGTAGAAAAAGGAATCTA
TCAAACTTCTAACTTTAGAGTCCAACCAACAGAATCTATTGTTAGATTTC
CTAATATTACAAACTTGTGCCCTTTTGGTGAAGTTTTTAACGCCACCAGA
TTTGCATCTGTTTATGCTTGGAACAGGAAGAGAATCAGCAACTGTGTTGC
TGATTATTCTGTCCTATATAATTCCGCATCATTTTCCACTTTTAAGTGTT
ATGGAGTGTCTCCTACTAAATTAAATGATCTCTGCTTTACTAATGTCTAT
GCAGATTCATTTGTAATTAGAGGTGATGAAGTCAGACAAATCGCTCCAGG
GCAAACTGGAAAGATTGCTGATTATAATTATAAATTACCAGATGATTTTA
CAGGCTGCGTTATAGCTTGGAATTCTAACAATCTTGATTCTAAGGTTGGT
GGTAATTATAATTACCTGTATAGATTGTTTAGGAAGTCTAATCTCAAACC
TTTTGAGAGAGATATTTCAACTGAAATCTATCAGGCCGGTAGCACACCTT
GTAATGGTGTTGAAGGTTTTAATTGTTACTTTCCTTTACAATCATATGGT
TTCCAACCCACTAATGGTGTTGGTTACCAACCATACAGAGTAGTAGTACT
TTCTTTTGAACTTCTACATGCACCAGCAACTGTTTGTGGACCTAAAAAGT
CTACTAATTTGGTTAAAAACAAATGTGTCAATTTCAACTTCAATGGTTTA
ACAGGCACAGGTGTTCTTACTGAGTCTAACAAAAAGTTTCTGCCTTTCCA
ACAATTTGGCAGAGACATTGCTGACACTACTGATGCTGTCCGTGATCCAC
AGACACTTGAGATTCTTGACATTACACCATGTTCTTTTGGTGGTGTCAGT
GTTATAACACCAGGAACAAATACTTCTAACCAGGTTGCTGTTCTTTATCA
GGATGTTAACTGCACAGAAGTCCCTGTTGCTATTCATGCAGATCAACTTA
CTCCTACTTGGCGTGTTTATTCTACAGGTTCTAATGTTTTTCAAACACGT
GCAGGCTGTTTAATAGGGGCTGAACATGTCAACAACTCATATGAGTGTGA
CATACCCATTGGTGCAGGTATATGCGCTAGTTATCAGACTCAGACTAATT
CTCCTCGGCGGGCACGTAGTGTAGCTAGTCAATCCATCATTGCCTACACT
ATGTCACTTGGTGCAGAAAATTCAGTTGCTTACTCTAATAACTCTATTGC
CATACCCACAAATTTTACTATTAGTGTTACCACAGAAATTCTACCAGTGT
CTATGACCAAGACATCAGTAGATTGTACAATGTACATTTGTGGTGATTCA
ACTGAATGCAGCAATCTTTTGTTGCAATATGGCAGTTTTTGTACACAATT
AAACCGTGCTTTAACTGGAATAGCTGTTGAACAAGACAAAAACACCCAAG
AAGTTTTTGCACAAGTCAAACAAATTTACAAAACACCACCAATTAAAGAT
TTTGGTGGTTTTAATTTTTCACAAATATTACCAGATCCATCAAAACCAAG
CAAGAGGTCATTTATTGAAGATCTACTTTTCAACAAAGTGACACTTGCAG
ATGCTGGCTTCATCAAACAATATGGTGATTGCCTTGGTGATATTGCTGCT
AGAGACCTCATTTGTGCACAAAAGTTTAACGGCCTTACTGTTTTGCCACC
TTTGCTCACAGATGAAATGATTGCTCAATACACTTCTGCACTGTTAGCGG
GTACAATCACTTCTGGTTGGACCTTTGGTGCAGGTGCTGCATTACAAATA
CCATTTGCTATGCAAATGGCTTATAGGTTTAATGGTATTGGAGTTACACA
GAATGTTCTCTATGAGAACCAAAAATTGATTGCCAACCAATTTAATAGTG
CTATTGGCAAAATTCAAGACTCACTTTCTTCCACAGCAAGTGCACTTGGA
AAACTTCAAGATGTGGTCAACCAAAATGCACAAGCTTTAAACACGCTTGT
TAAACAACTTAGCTCCAATTTTGGTGCAATTTCAAGTGTTTTAAATGATA
TCCTTTCACGTCTTGACAAAGTTGAGGCTGAAGTGCAAATTGATAGGTTG
ATCACAGGCAGACTTCAAAGTTTGCAGACATATGTGACTCAACAATTAAT
TAGAGCTGCAGAAATCAGAGCTTCTGCTAATCTTGCTGCTACTAAAATGT
CAGAGTGTGTACTTGGACAATCAAAAAGAGTTGATTTTTGTGGAAAGGGC
TATCATCTTATGTCCTTCCCTCAGTCAGCACCTCATGGTGTAGTCTTCTT
GCATGTGACTTATGTCCCTGCACAAGAAAAGAACTTCACAACTGCTCCTG
CCATTTGTCATGATGGAAAAGCACACTTTCCTCGTGAAGGTGTCTTTGTT
TCAAATGGCACACACTGGTTTGTAACACAAAGGAATTTTTATGAACCACA
AATCATTACTACAGACAACACATTTGTGTCTGGTAACTGTGATGTTGTAA
TAGGAATTGTCAACAACACAGTTTATGATCCTTTGCAACCTGAATTAGAC
TCATTCAAGGAGGAGTTAGATAAATATTTTAAGAATCATACATCACCAGA
TGTTGATTTAGGTGACATCTCTGGCATTAATGCTTCAGTTGTAAACATTC
AAAAAGAAATTGACCGCCTCAATGAGGTTGCCAAGAATTTAAATGAATCT
CTCATCGATCTCCAAGAACTTGGAAAGTATGAGCAGTATATAAAATGGCC
ATGGTACATTTGGCTAGGTTTTATAGCTGGCTTGATTGCCATAGTAATGG
TGACAATTATGCTTTGCTGTATGACCAGTTGCTGTAGTTGTCTCAAGGGC
TGTTGTTCTTGTGGATCCTGCTGCAAATTTGATGAAGACGACTCTGAGCC
AGTGCTCAAAGGAGTCAAATTACATTACACATAAACGAACTTATGGATTT
GTTTATGAGAATCTTCACAATTGGAACTGTAACTTTGAAGCAAGGTGAAA
TCAAGGATGCTACTCCTTCAGATTTTGTTCGCGCTACTGCAACGATACCG
ATACAAGCCTCACTCCCTTTCGGATGGCTTATTGTTGGCGTTGCACTTCT
TGCTGTTTTTCAGAGCGCTTCCAAAATCATAACCCTCAAAAAGAGATGGC
AACTAGCACTCTCCAAGGGTGTTCACTTTGTTTGCAACTTGCTGTTGTTG
TTTGTAACAGTTTACTCACACCTTTTGCTCGTTGCTGCTGGCCTTGAAGC
CCCTTTTCTCTATCTTTATGCTTTAGTCTACTTCTTGCAGAGTATAAACT
TTGTAAGAATAATAATGAGGCTTTGGCTTTGCTGGAAATGCCGTTCCAAA
AACCCATTACTTTATGATGCCAACTATTTTCTTTGCTGGCATACTAATTG
TTACGACTATTGTATACCTTACAATAGTGTAACTTCTTCAATTGTCATTA
CTTCAGGTGATGGCACAACAAGTCCTATTTCTGAACATGACTACCAGATT
GGTGGTTATACTGAAAAATGGGAATCTGGAGTAAAAGACTGTGTTGTATT
ACACAGTTACTTCACTTCAGACTATTACCAGCTGTACTCAACTCAATTGA
GTACAGACACTGGTGTTGAACATGTTACCTTCTTCATCTACAATAAAATT
GTTGATGAGCCTGAAGAACATGTCCAAATTCACACAATCGACGGTTCATC
CGGAGTTGTTAATCCAGTAATGGAACCAATTTATGATGAACCGACGACGA
CTACTAGCGTGCCTTTGTAAGCACAAGCTGATGAGTACGAACTTATGTAC
TCATTCGTTTCGGAAGAGACAGGTACGTTAATAGTTAATAGCGTACTTCT
TTTTCTTGCTTTCGTGGTATTCTTGCTAGTTACACTAGCCATCCTTACTG
CGCTTCGATTGTGTGCGTACTGCTGCAATATTGTTAACGTGAGTCTTGTA
AAACCTTCTTTTTACGTTTACTCTCGTGTTAAAAATCTGAATTCTTCTAG
AGTTCCTGATCTTCTGGTCTAAACGAACTAAATATTATATTAGTTTTTCT
GTTTGGAACTTTAATTTTAGCCATGGCAGATTCCAACGGTACTATTACCG
TTGAAGAGCTTAAAAAGCTCCTTGAACAATGGAACCTAGTAATAGGTTTC
CTATTCCTTACATGGATTTGTCTTCTACAATTTGCCTATGCCAACAGGAA
TAGGTTTTTGTATATAATTAAGTTAATTTTCCTCTGGCTGTTATGGCCAG
TAACTTTAGCTTGTTTTGTGCTTGCTGCTGTTTACAGAATAAATTGGATC
ACCGGTGGAATTGCTATCGCAATGGCTTGTCTTGTAGGCTTGATGTGGCT
CAGCTACTTCATTGCTTCTTTCAGACTGTTTGCGCGTACGCGTTCCATGT
GGTCATTCAATCCAGAAACTAACATTCTTCTCAACGTGCCACTCCATGGC
ACTATTCTGACCAGACCGCTTCTAGAAAGTGAACTCGTAATCGGAGCTGT
GATCCTTCGTGGACATCTTCGTATTGCTGGACACCATCTAGGACGCTGTG
ACATCAAGGACCTGCCTAAAGAAATCACTGTTGCTACATCACGAACGCTT
TCTTATTACAAATTGGGAGCTTCGCAGCGTGTAGCAGGTGACTCAGGTTT
TGCTGCATACAGTCGCTACAGGATTGGCAACTATAAATTAAACACAGACC
ATTCCAGTAGCAGTGACAATATTGCTTTGCTTGTACAGTAAGTGACAACA
GATGTTTCATCTCGTTGACTTTCAGGTTACTATAGCAGAGATATTACTAA
TTATTATGAGGACTTTTAAAGTTTCCATTTGGAATCTTGATTACATCATA
AACCTCATAATTAAAAATTTATCTAAGTCACTAACTGAGAATAAATATTC
TCAATTAGATGAAGAGCAACCAATGGAGATTGATTAAACGAACATGAAAA
TTATTCTTTTCTTGGCACTGATAACACTCGCTACTTGTGAGCTTTATCAC
TACCAAGAGTGTGTTAGAGGTACAACAGTACTTTTAAAAGAACCTTGCTC
TTCTGGAACATACGAGGGCAATTCACCATTTCATCCTCTAGCTGATAACA
AATTTGCACTGACTTGCTTTAGCACTCAATTTGCTTTTGCTTGTCCTGAC
GGCGTAAAACACGTCTATCAGTTACGTGCCAGATCAGTTTCACCTAAACT
GTTCATCAGACAAGAGGAAGTTCAAGAACTTTACTCTCCAATTTTTCTTA
TTGTTGCGGCAATAGTGTTTATAACACTTTGCTTCACACTCAAAAGAAAG
ACAGAATGATTGAACTTTCATTAATTGACTTCTATTTGTGCTTTTTAGCC
TTTCTGCTATTCCTTGTTTTAATTATGCTTATTATCTTTTGGTTCTCACT
TGAACTGCAAGATCATAATGAAACTTGTCACGCCTAAACGAACATGAAAT
TTCTTGTTTTCTTAGGAATCATCACAACTGTAGCTGCATTTCACCAAGAA
TGTAGTTTACAGTCATGTACTCAACATCAACCATATGTAGTTGATGACCC
GTGTCCTATTCACTTCTATTCTAAATGGTATATTAGAGTAGGAGCTAGAA
AATCAGCACCTTTAATTGAATTGTGCGTGGATGAGGCTGGTTCTAAATCA
CCCATTCAGTACATCGATATCGGTAATTATACAGTTTCCTGTTTACCTTT
TACAATTAATTGCCAGGAACCTAAATTGGGTAGTCTTGTAGTGCGTTGTT
CGTTCTATGAAGACTTTTTAGAGTATCATGACGTTCGTGTTGTTTTAGAT
TTCATCTAAACGAACAAACTAAAATGTCTGATAATGGACCCCAAAATCAG
CGAAATGCACCCCGCATTACGTTTGGTGGACCCTCAGATTCAACTGGCAG
TAACCAGAATGGAGAACGCAGTGGGGCGCGATCAAAACAACGTCGGCCCC
AAGGTTTACCCAATAATACTGCGTCTTGGTTCACCGCTCTCACTCAACAT
GGCAAGGAAGACCTTAAATTCCCTCGAGGACAAGGCGTTCCAATTAACAC
CAATAGCAGTCCAGATGACCAAATTGGCTACTACCGAAGAGCTACCAGAC
GAATTCGTGGTGGTGACGGTAAAATGAAAGATCTCAGTCCAAGATGGTAT
TTCTACTACCTAGGAACTGGGCCAGAAGCTGGACTTCCCTATGGTGCTAA
CAAAGACGGCATCATATGGGTTGCAACTGAGGGAGCCTTGAATACACCAA
AAGATCACATTGGCACCCGCAATCCTGCTAACAATGCTGCAATCGTGCTA
CAACTTCCTCAAGGAACAACATTGCCAAAAGGCTTCTACGCAGAAGGGAG
CAGAGGCGGCAGTCAAGCCTCTTCTCGTTCCTCATCACGTAGTCGCAACA
GTTCAAGAAATTCAACTCCAGGCAGCAGTAGGGGAACTTCTCCTGCTAGA
ATGGCTGGCAATGGCGGTGATGCTGCTCTTGCTTTGCTGCTGCTTGACAG
ATTGAACCAGCTTGAGAGCAAAATGTCTGGTAAAGGCCAACAACAACAAG
GCCAAACTGTCACTAAGAAATCTGCTGCTGAGGCTTCTAAGAAGCCTCGG
CAAAAACGTACTGCCACTAAAGCATACAATGTAACACAAGCTTTCGGCAG
ACGTGGTCCAGAACAAACCCAAGGAAATTTTGGGGACCAGGAACTAATCA
GACAAGGAACTGATTACAAACATTGGCCGCAAATTGCACAATTTGCCCCC
AGCGCTTCAGCGTTCTTCGGAATGTCGCGCATTGGCATGGAAGTCACACC
TTCGGGAACGTGGTTGACCTACACAGGTGCCATCAAATTGGATGACAAAG
ATCCAAATTTCAAAGATCAAGTCATTTTGCTGAATAAGCATATTGACGCA
TACAAAACATTCCCACCAACAGAGCCTAAAAAGGACAAAAAGAAGAAGGC
TGATGAAACTCAAGCCTTACCGCAGAGACAGAAGAAACAGCAAACTGTGA
CTCTTCTTCCTGCTGCAGATTTGGATGATTTCTCCAAACAATTGCAACAA
TCCATGAGCAGTGCTGACTCAACTCAGGCCTAAACTCATGCAGACCACAC
AAGGCAGATGGGCTATATAAACGTTTTCGCTTTTCCGTTTACGATATATA
GTCTACTCTTGTGCAGAATGAATTCTCGTAACTACATAGCACAAGTAGAT
GTAGTTAACTTTAATCTCACATAGCAATCTTTAATCAGTGTGTAACATTA
GGGAGGACTTGAAAGAGCCACCACATTTTCACCGAGGCCACGCGGAGTAC
GATCGAGTGTACAGTGAACAATGCTAGGGAGAGCTGCCTATATGGAAGAG
CCCTAATGTGTAAAATTAATTTTAGTAGTGCTATCCCCATGTGATTTTAA
TAGCTTCTTAGGAGAATGACAAAAAAAAAAAAAAAAAAAAAAAAAAAAAA
AAA (SEQ ID NO: 1)

TABLE 5
SARS-CoV2 gene sequences

| Gene | Start | End | Sequence |
|---|---|---|---|
| orf1a | 266 | 13483 | ATGGAGAGCCTTGTCCCTGGTTTCAACGAGAAAACAC |
| (SEQ ID | | | ACGTCCAACTCAGTTTGCCTGTTTTACAGGTTCGCGAC |
| NO: 2) | | | GTGCTCGTACGTGGCTTTGGAGACTCCGTGGAGGAGG |
| | | | TCTTATCAGAGGCACGTCAACATCTTAAAGATGGCAC |
| | | | TTGTGGCTTAGTAGAAGTTGAAAAAGGCGTTTTGCCTC |
| | | | AACTTGAACAGCCCTATGTGTTCATCAAACGTTCGGAT |
| | | | GCTCGAACTGCACCTCATGGTCATGTTATGGTTGAGCT |
| | | | GGTAGCAGAACTCGAAGGCATTCAGTACGGTCGTAGT |
| | | | GGTGAGACACTTGGTGTCCTTGTCCCTCATGTGGGCGA |
| | | | AATACCAGTGGCTTACCGCAAGGTTCTTCTTCGTAAGA |
| | | | ACGGTAATAAAGGAGCTGGTGGCCATAGTTACGGCGC |
| | | | CGATCTAAAGTCATTTGACTTAGGCGACGAGCTTGGC |
| | | | ACTGATCCTTATGAAGATTTTCAAGAAAACTGGAACA |
| | | | CTAAACATAGCAGTGGTGTTACCCGTGAACTCATGCG |
| | | | TGAGCTTAACGGAGGGGCATACACTCGCTATGTCGAT |
| | | | AACAACTTCTGTGGCCCTGATGGCTACCCTCTTGAGTG |
| | | | CATTAAAGACCTTCTAGCACGTGCTGGTAAAGCTTCAT |
| | | | GCACTTTGTCCGAACAACTGGACTTTATTGACACTAAG |
| | | | AGGGGTGTATACTGCTGCCGTGAACATGAGCATGAAA |
| | | | TTGCTTGGTACACGGAACGTTCTGAAAAGAGCTATGA |
| | | | ATTGCAGACACCTTTTGAAATTAAATTGGCAAAGAAA |
| | | | TTTGACACCTTCAATGGGGAATGTCCAAATTTTGTATT |
| | | | TCCCTTAAATTCCATAATCAAGACTATTCAACCAAGGG |
| | | | TTGAAAAGAAAAAGCTTGATGGCTTTATGGGTAGAAT |
| | | | TCGATCTGTCTATCCAGTTGCGTCACCAAATGAATGCA |
| | | | ACCAAATGTGCCTTTCAACTCTCATGAAGTGTGATCAT |
| | | | TGTGGTGAAACTTCATGGCAGACGGGCGATTTTGTTA |
| | | | AAGCCACTTGCGAATTTTGTGGCACTGAGAATTTGACT |
| | | | AAAGAAGGTGCCACTACTTGTGGTTACTTACCCCAAA |
| | | | ATGCTGTTGTTAAAATTTATTGTCCAGCATGTCACAAT |
| | | | TCAGAAGTAGGACCTGAGCATAGTCTTGCCGAATACC |
| | | | ATAATGAATCTGGCTTGAAAACCATTCTTCGTAAGGGT |
| | | | GGTCGCACTATTGCCTTTGGAGGCTGTGTGTTCTCTTA |
| | | | TGTTGGTTGCCATAACAAGTGTGCCTATTGGGTTCCAC |
| | | | GTGCTAGCGCTAACATAGGTTGTAACCATACAGGTGT |
| | | | TGTTGGAGAAGGTTCCGAAGGTCTTAATGACAACCTT |
| | | | CTTGAAATACTCCAAAAAGAGAAAGTCAACATCAATA |
| | | | TTGTTGGTGACTTTAAACTTAATGAAGAGATCGCCATT |
| | | | ATTTTGGCATCTTTTTCTGCTTCCACAAGTGCTTTTGT |
| | | | GGAAACTGTGAAAGGTTTGGATTATAAAGCATTCAAAC |
| | | | AAATTGTTGAATCCTGTGGTAATTTTAAAGTTACAAAA |
| | | | GGAAAAGCTAAAAAAGGTGCCTGGAATATTGGTGAAC |
| | | | AGAAATCAATACTGAGTCCTCTTTATGCATTTGCATCA |
| | | | GAGGCTGCTCGTGTTGTACGATCAATTTTCTCCCGCAC |
| | | | TCTTGAAACTGCTCAAAATTCTGTGCGTGTTTTACAGA |
| | | | AGGCCGCTATAACAATACTAGATGGAATTTCACAGTA |
| | | | TTCACTGAGACTCATTGATGCTATGATGTTCACATCTG |
| | | | ATTTGGCTACTAACAATCTAGTTGTAATGGCCTACATT |
| | | | ACAGGTGGTGTTGTTCAGTTGACTTCGCAGTGGCTAAC |
| | | | TAACATCTTTGGCACTGTTTATGAAAAACTCAAACCCG |
| | | | TCCTTGATTGGCTTGAAGAGAAGTTTAAGGAAGGTGT |
| | | | AGAGTTTCTTAGAGACGGTTGGGAAATTGTTAAATTTA |
| | | | TCTCAACCTGTGCTTGTGAAATTGTCGGTGGACAAATT |
| | | | GTCACCTGTGCAAAGGAAATTAAGGAGAGTGTTCAGA |
| | | | CATTCTTTAAGCTTGTAAATAAATTTTTGGCTTTGTGT |
| | | | GCTGACTCTATCATTATTGGTGGAGCTAAACTTAAAGC |
| | | | CTTGAATTTAGGTGAAACATTTGTCACGCACTCAAAG |
| | | | GGATTGTACAGAAAGTGTGTTAAATCCAGAGAAGAAA |
| | | | CTGGCCTACTCATGCCTCTAAAAGCCCCAAAAGAAAT |
| | | | TATCTTCTTAGAGGGAGAAACACTTCCCACAGAAGTG |
| | | | TTAACAGAGGAAGTTGTCTTGAAAACTGGTGATTTAC |
| | | | AACCATTAGAACAACCTACTAGTGAAGCTGTTGAAGC |
| | | | TCCATTGGTTGGTACACCAGTTTGTATTAACGGGCTTA |
| | | | TGTTGCTCGAAATCAAAGACACAGAAAAGTACTGTGC |
| | | | CCTTGCACCTAATATGATGGTAACAAACAATACCTTCA |
| | | | CACTCAAAGGCGGTGCACCAACAAAGGTTACTTTTGG |
| | | | TGATGACACTGTGATAGAAGTGCAAGGTTACAAGAGT |
| | | | GTGAATATCACTTTTGAACTTGATGAAAGGATTGATA |
| | | | AAGTACTTAATGAGAAGTGCTCTGCCTATACAGTTGA |
| | | | ACTCGGTACAGAAGTAAATGAGTTCGCCTGTGTTGTG |
| | | | GCAGATGCTGTCATAAAAACTTTGCAACCAGTATCTG |
| | | | AATTACTTACACCACTGGGCATTGATTTAGATGAGTGG |
| | | | AGTATGGCTACATACTACTTATTTGATGAGTCTGGTGA |
| | | | GTTTAAATTGGCTTCACATATGTATTGTTCTTTCTACC |
| | | | CTCCAGATGAGGATGAAGAAGAAGGTGATTGTGAAGA |
| | | | AGAAGAGTTTGAGCCATCAACTCAATATGAGTATGGT |
| | | | ACTGAAGATGATTACCAAGGTAAACCTTTGGAATTTG |
| | | | GTGCCACTTCTGCTGCTCTTCAACCTGAAGAAGAGCA |
| | | | AGAAGAAGATTGGTTAGATGATGATAGTCAACAAACT |
| | | | GTTGGTCAACAAGACGGCAGTGAGGACAATCAGACAA |
| | | | CTACTATTCAAACAATTGTTGAGGTTCAACCTCAATTA |
| | | | GAGATGGAACTTACACCAGTTGTTCAGACTATTGAAG |
| | | | TGAATAGTTTTAGTGGTTATTTAAAACTTACTGACAAT |
| | | | GTATACATTAAAAATGCAGACATTGTGGAAGAAGCTA |
| | | | AAAAGGTAAAACCAACAGTGGTTGTTAATGCAGCCAA |
| | | | TGTTTACCTTAAACATGGAGGAGGTGTTGCAGGAGCC |
| | | | TTAAATAAGGCTACTAACAATGCCATGCAAGTTGAAT |
| | | | CTGATGATTACATAGCTACTAATGGACCACTTAAAGT |
| | | | GGGTGGTAGTTGTGTTTTAAGCGGACACAATCTTGCTA |
| | | | AACACTGTCTTCATGTTGTCGGCCCAAATGTTAACAAA |
| | | | GGTGAAGACATTCAACTTCTTAAGAGTGCTTATGAAA |
| | | | ATTTTAATCAGCACGAAGTTCTACTTGCACCATTATTA |
| | | | TCAGCTGGTATTTTTGGTGCTGACCCTATACATTCTTT |
| | | | AAGAGTTTGTGTAGATACTGTTCGCACAAATGTCTACT |
| | | | TAGCTGTCTTTGATAAAAATCTCTATGACAAACTTGTT |
| | | | TCAAGCTTTTTGGAAATGAAGAGTGAAAAGCAAGTTG |
| | | | AACAAAAGATCGCTGAGATTCCTAAAGAGGAAGTTAA |
| | | | GCCATTTATAACTGAAAGTAAACCTTCAGTTGAACAG |
| | | | AGAAAACAAGATGATAAGAAAATCAAAGCTTGTGTTG |
| | | | AAGAAGTTACAACAACTCTGGAAGAAACTAAGTTCCT |
| | | | CACAGAAAACTTGTTACTTTATATTGACATTAATGGCA |
| | | | ATCTTCATCCAGATTCTGCCACTCTTGTTAGTGACATT |
| | | | GACATCACTTTCTTAAAGAAAGATGCTCCATATATAGT |
| | | | GGGTGATGTTGTTCAAGAGGGTGTTTTAACTGCTGTGG |
| | | | TTATACCTACTAAAAAGGCTGGTGGCACTACTGAAAT |
| | | | GCTAGCGAAAGCTTTGAGAAAAGTGCCAACAGACAAT |
| | | | TATATAACCACTTACCCGGGTCAGGGTTTAAATGGTTA |
| | | | CACTGTAGAGGAGGCAAAGACAGTGCTTAAAAAGTGT |
| | | | AAAAGTGCCTTTTACATTCTACCATCTATTATCTCTAA |
| | | | TGAGAAGCAAGAAATTCTTGGAACTGTTTCTTGGAATT |
| | | | TGCGAGAAATGCTTGCACATGCAGAAGAAACACGCAA |
| | | | ATTAATGCCTGTCTGTGTGGAAACTAAAGCCATAGTTT |
| | | | CAACTATACAGCGTAAATATAAGGGTATTAAAATACA |
| | | | AGAGGGTGTGGTTGATTATGGTGCTAGATTTTACTTTT |
| | | | ACACCAGTAAAACAACTGTAGCGTCACTTATCAACAC |
| | | | ACTTAACGATCTAAATGAAACTCTTGTTACAATGCCAC |
| | | | TTGGCTATGTAACACATGGCTTAAATTTGGAAGAAGC |
| | | | TGCTCGGTATATGAGATCTCTCAAAGTGCCAGCTACA |
| | | | GTTTCTGTTTCTTCACCTGATGCTGTTACAGCGTATAA |
| | | | TGGTTATCTTACTTCTTCTTCTAAAACACCTGAAGAAC |
| | | | ATTTTATTGAAACCATCTCACTTGCTGGTTCCTATAAA |
| | | | GATTGGTCCTATTCTGGACAATCTACACAACTAGGTAT |
| | | | AGAATTTCTTAAGAGAGGTGATAAAAGTGTATATTAC |
| | | | ACTAGTAATCCTACCACATTCCACCTAGATGGTGAAGT |
| | | | TATCACCTTTGACAATCTTAAGACACTTCTTTCTTTGA |
| | | | GAGAAGTGAGGACTATTAAGGTGTTTACAACAGTAGA |
| | | | CAACATTAACCTCCACACGCAAGTTGTGGACATGTCA |
| | | | ATGACATATGGACAACAGTTTGGTCCAACTTATTTGGA |
| | | | TGGAGCTGATGTTACTAAAATAAAACCTCATAATTCA |
| | | | CATGAAGGTAAAACATTTTATGTTTTACCTAATGATGA |
| | | | CACTCTACGTGTTGAGGCTTTTGAGTACTACCACACAA |
| | | | CTGATCCTAGTTTTCTGGGTAGGTACATGTCAGCATTA |
| | | | AATCACACTAAAAAGTGGAAATACCCACAAGTTAATG |
| | | | GTTTAACTTCTATTAAATGGGCAGATAACAACTGTTAT |
| | | | CTTGCCACTGCATTGTTAACACTCCAACAAATAGAGTT |
| | | | GAAGTTTAATCCACCTGCTCTACAAGATGCTTATTACA |
| | | | GAGCAAGGGCTGGTGAAGCTGCTAACTTTTGTGCACT |
| | | | TATCTTAGCCTACTGTAATAAGACAGTAGGTGAGTTA |
| | | | GGTGATGTTAGAGAAACAATGAGTTACTTGTTTCAAC |
| | | | ATGCCAATTTAGATTCTTGCAAAAGAGTCTTGAACGTG |
| | | | GTGTGTAAAACTTGTGGACAACAGCAGACAACCCTTA |
| | | | AGGGTGTAGAAGCTGTTATGTACATGGGCACACTTTCT |
| | | | TATGAACAATTTAAGAAAGGTGTTCAGATACCTTGTA |
| | | | CGTGTGGTAAACAAGCTACAAAATATCTAGTACAACA |
| | | | GGAGTCACCTTTTGTTATGATGTCAGCACCACCTGCTC |
| | | | AGTATGAACTTAAGCATGGTACATTTACTTGTGCTAGT |
| | | | GAGTACACTGGTAATTACCAGTGTGGTCACTATAAAC |
| | | | ATATAACTTCTAAAGAAACTTTGTATTGCATAGACGGT |
| | | | GCTTTACTTACAAAGTCCTCAGAATACAAAGGTCCTAT |
| | | | TACGGATGTTTTCTACAAAGAAAACAGTTACACAACA |
| | | | ACCATAAAACCAGTTACTTATAAATTGGATGGTGTTGT |
| | | | TTGTACAGAAATTGACCCTAAGTTGGACAATTATTATA |
| | | | AGAAAGACAATTCTTATTTCACAGAGCAACCAATTGA |
| | | | TCTTGTACCAAACCAACCATATCCAAACGCAAGCTTC |
| | | | GATAATTTTAAGTTTGTATGTGATAATATCAAATTTGC |
| | | | TGATGATTTAAACCAGTTAACTGGTTATAAGAAACCT |
| | | | GCTTCAAGAGAGCTTAAAGTTACATTTTTCCCTGACTT |
| | | | AAATGGTGATGTGGTGGCTATTGATTATAAACACTAC |
| | | | ACACCCTCTTTTAAGAAAGGAGCTAAATTGTTACATA |
| | | | AACCTATTGTTTGGCATGTTAACAATGCAACTAATAAA |
| | | | GCCACGTATAAACCAAATACCTGGTGTATACGTTGTCT |
| | | | TTGGAGCACAAAACCAGTTGAAACATCAAATTCGTTT |
| | | | GATGTACTGAAGTCAGAGGACGCGCAGGGAATGGATA |
| | | | ATCTTGCCTGCGAAGATCTAAAACCAGTCTCTGAAGA |
| | | | AGTAGTGGAAAATCCTACCATACAGAAAGACGTTCTT |
| | | | GAGTGTAATGTGAAAACTACCGAAGTTGTAGGAGACA |
| | | | TTATACTTAAACCAGCAAATAATAGTTTAAAAATTAC |
| | | | AGAAGAGGTTGGCCACACAGATCTAATGGCTGCTTAT |
| | | | GTAGACAATTCTAGTCTTACTATTAAGAAACCTAATGA |
| | | | ATTATCTAGAGTATTAGGTTTGAAAACCCTTGCTACTC |
| | | | ATGGTTTAGCTGCTGTTAATAGTGTCCCTTGGGATACT |
| | | | ATAGCTAATTATGCTAAGCCTTTTCTTAACAAAGTTGT |
| | | | TAGTACAACTACTAACATAGTTACACGGTGTTTAAACC |
| | | | GTGTTTGTACTAATTATATGCCTTATTTCTTTACTTTA |
| | | | TTGCTACAATTGTGTACTTTTACTAGAAGTACAAATTC |
| | | | TAGAATTAAAGCATCTATGCCGACTACTATAGCAAAGA |
| | | | ATACTGTTAAGAGTGTCGGTAAATTTTGTCTAGAGGCT |
| | | | TCATTTAATTATTTGAAGTCACCTAATTTTTCTAAACT |
| | | | GATAAATATTATAATTTGGTTTTTACTATTAAGTGTTT |
| | | | GCCTAGGTTCTTTAATCTACTCAACCGCTGCTTTAGGT |
| | | | GTTTTAATGTCTAATTTAGGCATGCCTTCTTACTGTAC |
| | | | TGGTTACAGAGAAGGCTATTTGAACTCTACTAATGTCA |
| | | | CTATTGCAACCTACTGTACTGGTTCTATACCTTGTAGT |
| | | | GTTTGTCTTAGTGGTTTAGATTCTTTAGACACCTATCC |
| | | | TTCTTTAGAAACTATACAAATTACCATTTCATCTTTTA |
| | | | AATGGGATTTAACTGCTTTTGGCTTAGTTGCAGAGTGG |
| | | | TTTTTGGCATATATTCTTTTCACTAGGTTTTTCTATGT |
| | | | ACTTGGATTGGCTGCAATCATGCAATTGTTTTTCAGCT |
| | | | ATTTTGCAGTACATTTTATTAGTAATTCTTGGCTTAT |
| | | | GTGGTTAATAATTAATCTTGTACAAATGGCCCCGATTT |
| | | | CAGCTATGGTTAGAATGTACATCTTCTTTGCATCATT |
| | | | TTATTATGTATGGAAAAGTTATGTGCATGTTGTAGACG |
| | | | GTTGTAATTCATCAACTTGTATGATGTGTTACAAACGT |
| | | | AATAGAGCAACAAGAGTCGAATGTACAACTATTGTTAA |
| | | | TGGTGTTAGAAGGTCCTTTTATGTCTATGCTAATGGAG |
| | | | GTAAAGGCTTTTGCAAACTACACAATTGGAATTGTGTT |
| | | | AATTGTGATACATTCTGTGCTGGTAGTACATTTATTAG |
| | | | TGATGAAGTTGCGAGAGACTTGTCACTACAGTTTAAA |
| | | | AGACCAATAAATCCTACTGACCAGTCTTCTTACATCGT |
| | | | TGATAGTGTTACAGTGAAGAATGGTTCCATCCATCTTT |
| | | | ACTTTGATAAAGCTGGTCAAAAGACTTATGAAAGACATTC |
| | | | TCTCTCTCATTTTGTTAACTTAGACAACCTGAGAGCTAA |
| | | | TAACACTAAAGGTTCATTGCCTATTAATGTTATAGTTT |
| | | | TTGATGGTAAATCAAAATGTGAAGAATCATCTGCAAA |
| | | | ATCAGCGTCTGTTTACTACAGTCAGCTTATGTGTCAAC |
| | | | CTATACTGTTACTAGATCAGGCATTAGTGTCTGATGTT |
| | | | GGTGATAGTGCGGAAGTTGCAGTTAAAATGTTTGATG |
| | | | CTTACGTTAATACGTTTTCATCAACTTTTAACGTACCA |
| | | | ATGGAAAAACTCAAAACACTAGTTGCAACTGCAGAAG |
| | | | CTGAACTTGCAAAGAATGTGTCCTTAGACAATGTCTTA |
| | | | TCTACTTTTATTTCAGCAGCTCGGCAAGGGTTTGTTGA |
| | | | TTCAGATGTAGAAACTAAAGATGTTGTTGAATGTCTTA |
| | | | AATTGTCACATCAATCTGACATAGAAGTTACTGGCGA |
| | | | TAGTTGTAATAACTATATGCTCACCTATAACAAAGTTG |
| | | | AAAACATGACACCCCGTGACCTTGGTGCTTGTATTGAC |
| | | | TGTAGTGCGCGTCATATTAATGCGCAGGTAGCAAAAA |
| | | | GTCACAACATTGCTTTGATATGGAACGTTAAAGATTTC |
| | | | ATGTCATTGTCTGAACAACTACGAAAACAAATACGTA |
| | | | GTGCTGCTAAAAAGAATAACTTACCTTTTAAGTTGACA |
| | | | TGTGCAACTACTAGACAAGTTGTTAATGTTGTAACAAC |
| | | | AAAGATAGCACTTAAGGGTGGTAAAATTGTTAATAAT |
| | | | TGGTTGAAGCAGTTAATTAAAGTTACACTTGTGTTCCT |
| | | | TTTTGTTGCTGCTATTTTCTATTTAATAACACCTGTTCA |
| | | | TGTCATGTCTAAACATACTGACTTTTCAAGTGAAATCA |
| | | | TAGGATACAAGGCTATTGATGGTGGTGTCACTCGTGA |
| | | | CATAGCATCTACAGATACTTGTTTTGCTAACAAACATG |
| | | | CTGATTTTGACACATGGTTTAGCCAGCGTGGTGGTAGT |
| | | | TATACTAATGACAAAGCTTGCCCATTGATTGCTGCAGT |
| | | | CATAACAAGAGAAGTGGGTTTTGTCGTGCCTGGTTTGC |
| | | | CTGGCACGATATTACGCACAACTAATGGTGACTTTTTG |
| | | | CATTTCTTACCTAGAGTTTTTAGTGCAGTTGGTAACAT |
| | | | CTGTTACACACCATCAAAACTTATAGAGTACACTGACT |
| | | | TTGCAACATCAGCTTGTGTTTTGGCTGCTGAATGTACA |
| | | | ATTTTTAAAGATGCTTCTGGTAAGCCAGTACCATATTG |
| | | | TTATGATACCAATGTACTAGAAGGTTCTGTTGCTTATG |
| | | | AAAGTTTACGCCCTGACACACGTTATGTGCTCATGGAT |
| | | | GGCTCTATTATTCAATTTCCTAACACCTACCTTGAAGG |
| | | | TTCTGTTAGAGTGGTAACAACTTTTGATTCTGAGTACT |
| | | | GTAGGCACGGCACTTGTGAAAGATCAGAAGCTGGTGT |
| | | | TTGTGTATCTACTAGTGGTAGATGGGTACTTAACAATG |
| | | | ATTATTACAGATCTTTACCAGGAGTTTTCTGTGGTGTA |
| | | | GATGCTGTAAATTTACTTACTAATATGTTTACACCACT |
| | | | AATTCAACCTATTGGTGCTTTGGACATATCAGCATCTA |
| | | | TAGTAGCTGGTGGTATTGTAGCTATCGTAGTAACATGC |
| | | | CTTGCCTACTATTTTATGAGGTTTAGAAGAGCTTTTGG |
| | | | TGAATACAGTCATGTAGTTGCCTTTAATACTTTACTAT |
| | | | TCCTTATGTCATTCACTGTACTCTGTTTAACACCAGTTT |
| | | | ACTCATTCTTACCTGGTGTTTATTCTGTTATTTACTTGT |
| | | | ACTTGACATTTTATCTTACTAATGATGTTTCTTTTTTAG |
| | | | CACATATTCAGTGGATGGTTATGTTCACACCTTTAGTA |
| | | | CCTTTCTGGATAACAATTGCTTATATCATTTGTATTTCC |
| | | | ACAAAGCATTTCTATTGGTTCTTTAGTAATTACCTAAA |
| | | | GAGACGTGTAGTCTTTAATGGTGTTTCCTTTAGTACTT |
| | | | TTGAAGAAGCTGCGCTGTGCACCTTTTTGTTAAATAAA |
| | | | GAAATGTATCTAAAGTTGCGTAGTGATGTGCTATTACC |
| | | | TCTTACGCAATATAATAGATACTTAGCTCTTTATAATA |
| | | | AGTACAAGTATTTTAGTGGAGCAATGGATACAACTAG |
| | | | CTACAGAGAAGCTGCTTGTTGTCATCTCGCAAAGGCTC |
| | | | TCAATGACTTCAGTAACTCAGGTTCTGATGTTCTTTAC |
| | | | CAACCACCACAAACCTCTATCACCTCAGCTGTTTTGCA |
| | | | GAGTGGTTTTAGAAAAATGGCATTCCCATCTGGTAAA |
| | | | GTTGAGGGTTGTATGGTACAAGTAACTTGTGGTACAA |
| | | | CTACACTTAACGGTCTTTGGCTTGATGACGTAGTTTAC |
| | | | TGTCCAAGACATGTGATCTGCACCTCTGAAGACATGCT |
| | | | TAACCCTAATTATGAAGATTTACTCATTCGTAAGTCTA |
| | | | ATCATAATTTCTTGGTACAGGCTGGTAATGTTCAACTC |
| | | | AGGGTTATTGGACATTCTATGCAAAATTGTGTACTTAA |
| | | | GCTTAAGGTTGATACAGCCAATCCTAAGACACCTAAG |
| | | | TATAAGTTTGTTCGCATTCAACCAGGACAGACTTTTTC |
| | | | AGTGTTAGCTTGTTACAATGGTTCACCATCTGGTGTTT |
| | | | ACCAATGTGCTATGAGGCCCAATTTCACTATTAAGGGT |
| | | | TCATTCCTTAATGGTTCATGTGGTAGTGTTGGTTTTAA |
| | | | CATAGATTATGACTGTGTCTCTTTTTGTTACATGCACC |
| | | | ATATGGAATTACCAACTGGAGTTCATGCTGGCACAGA |
| | | | CTTAGAAGGTAACTTTTATGGACCTTTTGTTGACAGGC |
| | | | AAACAGCACAAGCAGCTGGTACGGACACAACTATTAC |
| | | | AGTTAATGTTTTAGCTTGGTTGTACGCTGCTGTTATAA |
| | | | ATGGAGACAGGTGGTTTCTCAATCGATTTACCACAACT |
| | | | CTTAATGACTTTAACCTTGTGGCTATGAAGTACAATTA |
| | | | TGAACCTCTAACACAAGACCATGTTGACATACTAGGA |
| | | | CCTCTTTCTGCTCAAACTGGAATTGCCGTTTTAGATAT |
| | | | GTGTGCTTCATTAAAAGAATTACTGCAAAATGGTATG |
| | | | AATGGACGTACCATATTGGGTAGTGCTTTATTAGAAG |
| | | | ATGAATTTACACCTTTTGATGTTGTTAGACAATGCTCA |
| | | | GGTGTTACTTTCCAAAGTGCAGTGAAAAGAACAATCA |
| | | | AGGGTACACACCACTGGTTGTTACTCACAATTTTGACT |
| | | | TCACTTTTAGTTTTAGTCCAGAGTACTCAATGGTCTTT |
| | | | GTTCTTTTTTTTGTATGAAAATGCCTTTTTACCTTTTGC |
| | | | TATGGGTATTATTGCTATGTCTGCTTTTGCAATGATGT |
| | | | TTGTCAAACATAAGCATGCATTTCTCTGTTTGTTTTTGT |
| | | | TACCTTCTCTTGCCACTGTAGCTTATTTTAATATGGTCT |
| | | | ATATGCCTGCTAGTTGGGTGATGCGTATTATGACATGG |
| | | | TTGGATATGGTTGATACTAGTTTGTCTGGTTTTAAGCT |
| | | | AAAAGACTGTGTTATGTATGCATCAGCTGTAGTGTTAC |
| | | | TAATCCTTATGACAGCAAGAACTGTGTATGATGATGG |
| | | | TGCTAGGAGAGTGTGGACACTTATGAATGTCTTGACA |
| | | | CTCGTTTATAAAGTTTATTATGGTAATGCTTTAGATCA |
| | | | AGCCATTTCCATGTGGGCTCTTATAATCTCTGTTACTT |
| | | | CTAACTACTCAGGTGTAGTTACAACTGTCATGTTTTTG |
| | | | GCCAGAGGTATTGTTTTTATGTGTGTTGAGTATTGCCC |
| | | | TATTTTCTTCATAACTGGTAATACACTTCAGTGTATAA |
| | | | TGCTAGTTTATTGTTTCTTAGGCTATTTTTGTACTTGTT |
| | | | ACTTTGGCCTCTTTTGTTTACTCAACCGCTACTTTAGAC |
| | | | TGACTCTTGGTGTTTATGATTACTTAGTTTCTACACAG |
| | | | GAGTTTAGATATATGAATTCACAGGGACTACTCCCAC |
| | | | CCAAGAATAGCATAGATGCCTTCAAACTCAACATTAA |
| | | | ATTGTTGGGTGTTGGTGGCAAACCTTGTATCAAAGTAG |
| | | | CCACTGTACAGTCTAAAATGTCAGATGTAAAGTGCAC |
| | | | ATCAGTAGTCTTACTCTCAGTTTTGCAACAACTCAGAG |
| | | | TAGAATCATCATCTAAATTGTGGGCTCAATGTGTCCAG |
| | | | TTACACAATGACATTCTCTTAGCTAAAGATACTACTGA |
| | | | AGCCTTTGAAAAAATGGTTTCACTACTTTCTGTTTTGC |
| | | | TTTCCATGCAGGGTGCTGTAGACATAAACAAGCTTTGT |
| | | | GAAGAAATGCTGGACAACAGGGCAACCTTACAAGCTA |
| | | | TAGCCTCAGAGTTTAGTTCCCTTCCATCATATGCAGCT |
| | | | TTTGCTACTGCTCAAGAAGCTTATGAGCAGGCTGTTGC |
| | | | TAATGGTGATTCTGAAGTTGTTCTTAAAAAGTTGAAGA |
| | | | AGTCTTTGAATGTGGCTAAATCTGAATTTGACCGTGAT |
| | | | GCAGCCATGCAACGTAAGTTGGAAAAGATGGCTGATC |
| | | | AAGCTATGACCCAAATGTATAAACAGGCTAGATCTGA |
| | | | GGACAAGAGGGCAAAAGTTACTAGTGCTATGCAGACA |
| | | | ATGCTTTTCACTATGCTTAGAAAGTTGGATAATGATGC |
| | | | ACTCAACAACATTATCAACAATGCAAGAGATGGTTGT |
| | | | GTTCCCTTGAACATAATACCTCTTACAACAGCAGCCAA |
| | | | ACTAATGGTTGTCATACCAGACTATAACACATATAAA |
| | | | AATACGTGTGATGGTACAACATTTACTTATGCATCAGC |
| | | | ATTGTGGGAAATCCAACAGGTTGTAGATGCAGATAGT |
| | | | AAAATTGTTCAACTTAGTGAAATTAGTATGGACAATTC |
| | | | ACCTAATTTAGCATGGCCTCTTATTGTAACAGCTTTAA |
| | | | GGGCCAATTCTGCTGTCAAATTACAGAATAATGAGCT |
| | | | TAGTCCTGTTGCACTACGACAGATGTCTTGTGCTGCCG |
| | | | GTACTACACAAACTGCTTGCACTGATGACAATGCGTT |
| | | | AGCTTACTACAACACAACAAAGGGAGGTAGGTTTGTA |
| | | | CTTGCACTGTTATCCGATTTACAGGATTTGAAATGGGC |
| | | | TAGATTCCCTAAGAGTGATGGAACTGGTACTATCTATA |
| | | | CAGAACTGGAACCACCTTGTAGGTTTGTTACAGACAC |
| | | | ACCTAAAGGTCCTAAAGTGAAGTATTTATACTTTATTA |
| | | | AAGGATTAAACAACCTAAATAGAGGTATGGTACTTGG |
| | | | TAGTTTAGCTGCCACAGTACGTCTACAAGCTGGTAATG |
| | | | CAACAGAAGTGCCTGCCAATTCAACTGTATTATCTTTC |
| | | | TGTGCTTTTGCTGTAGATGCTGCTAAAGCTTACAAAGA |
| | | | TTATCTAGCTAGTGGGGGACAACCAATCACTAATTGT |
| | | | GTTAAGATGTTGTGTACACACACTGGTACTGGTCAGG |
| | | | CAATAACAGTTACACCGGAAGCCAATATGGATCAAGA |
| | | | ATCCTTTGGTGGTGCATCGTGTTGTCTGTACTGCCGTT |
| | | | GCCACATAGATCATCCAAATCCTAAAGGATTTTGTGA |
| | | | CTTAAAAGGTAAGTATGTACAAATACCTACAACTTGT |
| | | | GCTAATGACCCTGTGGGTTTTACACTTAAAAACACAGT |
| | | | CTGTACCGTCTGCGGTATGTGGAAAGGTTATGGCTGTA |
| | | | GTTGTGATCAACTCCGCGAACCCATGCTTCAGTCAGCT |
| | | | GATGCACAATCGTTTTTAAACGGGTTTGCGGTGTA |
| orf1ab | 266 | 21555 | ATGGAGAGCCTTGTCCCTGGTTTCAACGAGAAAACAC |
| (SEQ ID | | | ACGTCCAACTCAGTTTGCCTGTTTTACAGGTTCGCGAC |
| NO: 3) | | | GTGCTCGTACGTGGCTTTGGAGACTCCGTGGAGGAGG |
| | | | TCTTATCAGAGGCACGTCAACATCTTAAAGATGGCAC |
| | | | TTGTGGCTTAGTAGAAGTTGAAAAAGGCGTTTTGCCTC |
| | | | AACTTGAACAGCCCTATGTGTTCATCAAACGTTCGGAT |
| | | | GCTCGAACTGCACCTCATGGTCATGTTATGGTTGAGCT |
| | | | GGTAGCAGAACTCGAAGGCATTCAGTACGGTCGTAGT |
| | | | GGTGAGACACTTGGTGTCCTTGTCCCTCATGTGGGCGA |
| | | | AATACCAGTGGCTTACCGCAAGGTTCTTCTTCGTAAGA |
| | | | ACGGTAATAAAGGAGCTGGTGGCCATAGTTACGGCGC |
| | | | CGATCTAAAGTCATTTGACTTAGGCGACGAGCTTGGC |
| | | | ACTGATCCTTATGAAGATTTTCAAGAAAACTGGAACA |
| | | | CTAAACATAGCAGTGGTGTTACCCGTGAACTCATGCG |
| | | | TGAGCTTAACGGAGGGGCATACACTCGCTATGTCGAT |
| | | | AACAACTTCTGTGGCCCTGATGGCTACCCTCTTGAGTG |
| | | | CATTAAAGACCTTCTAGCACGTGCTGGTAAAGCTTCAT |
| | | | GCACTTTGTCCGAACAACTGGACTTTATTGACACTAAG |
| | | | AGGGGTGTATACTGCTGCCGTGAACATGAGCATGAAA |
| | | | TTGCTTGGTACACGGAACGTTCTGAAAAGAGCTATGA |
| | | | ATTGCAGACACCTTTTGAAATTAAATTGGCAAAGAAA |
| | | | TTTGACACCTTCAATGGGGAATGTCCAAATTTTGTATT |
| | | | TCCCTTAAATTCCATAATCAAGACTATTCAACCAAGGG |
| | | | TTGAAAAGAAAAAGCTTGATGGCTTTATGGGTAGAAT |
| | | | TCGATCTGTCTATCCAGTTGCGTCACCAAATGAATGCA |
| | | | ACCAAATGTGCCTTTCAACTCTCATGAAGTGTGATCAT |
| | | | TGTGGTGAAACTTCATGGCAGACGGGCGATTTTGTTA |
| | | | AAGCCACTTGCGAATTTTGTGGCACTGAGAATTTGACT |
| | | | AAAGAAGGTGCCACTACTTGTGGTTACTTACCCCAAA |
| | | | ATGCTGTTGTTAAAATTTATTGTCCAGCATGTCACAAT |
| | | | TCAGAAGTAGGACCTGAGCATAGTCTTGCCGAATACC |
| | | | ATAATGAATCTGGCTTGAAAACCATTCTTCGTAAGGGT |
| | | | GGTCGCACTATTGCCTTTGGAGGCTGTGTGTTCTCTTA |
| | | | TGTTGGTTGCCATAACAAGTGTGCCTATTGGGTTCCAC |
| | | | GTGCTAGCGCTAACATAGGTTGTAACCATACAGGTGT |
| | | | TGTTGGAGAAGGTTCCGAAGGTCTTAATGACAACCTT |
| | | | CTTGAAATACTCCAAAAAGAGAAAGTCAACATCAATA |
| | | | TTGTTGGTGACTTTAAACTTAATGAAGAGATCGCCATT |
| | | | ATTTTGGCATCTTTTTCTGCTTCCACAAGTGCTTTTGTG |
| | | | GAAACTGTGAAAGGTTTGGATTATAAAGCATTCAAAC |
| | | | AAATTGTTGAATCCTGTGGTAATTTTAAAGTTACAAAA |
| | | | GGAAAAGCTAAAAAAGGTGCCTGGAATATTGGTGAAC |
| | | | AGAAATCAATACTGAGTCCTCTTTATGCATTTGCATCA |
| | | | GAGGCTGCTCGTGTTGTACGATCAATTTTCTCCCGCAC |
| | | | TCTTGAAACTGCTCAAAATTCTGTGCGTGTTTTACAGA |
| | | | AGGCCGCTATAACAATACTAGATGGAATTTCACAGTA |
| | | | TTCACTGAGACTCATTGATGCTATGATGTTCACATCTG |
| | | | ATTTGGCTACTAACAATCTAGTTGTAATGGCCTACATT |
| | | | ACAGGTGGTGTTGTTCAGTTGACTTCGCAGTGGCTAAC |
| | | | TAACATCTTTGGCACTGTTTATGAAAAACTCAAACCCG |
| | | | TCCTTGATTGGCTTGAAGAGAAGTTTAAGGAAGGTGT |
| | | | AGAGTTTCTTAGAGACGGTTGGGAAATTGTTAAATTTA |
| | | | TCTCAACCTGTGCTTGTGAAATTGTCGGTGGACAAATT |
| | | | GTCACCTGTGCAAAGGAAATTAAGGAGAGTGTTCAGA |
| | | | CATTCTTTAAGCTTGTAAATAAATTTTTGGCTTTGTGT |
| | | | GCTGACTCTATCATTATTGGTGGAGCTAAACTTAAAGC |
| | | | CTTGAATTTAGGTGAAACATTTGTCACGCACTCAAAG |
| | | | GGATTGTACAGAAAGTGTGTTAAATCCAGAGAAGAAA |
| | | | CTGGCCTACTCATGCCTCTAAAAGCCCCAAAAGAAAT |
| | | | TATCTTCTTAGAGGGAGAAACACTTCCCACAGAAGTG |
| | | | TTAACAGAGGAAGTTGTCTTGAAAACTGGTGATTTAC |
| | | | AACCATTAGAACAACCTACTAGTGAAGCTGTTGAAGC |
| | | | TCCATTGGTTGGTACACCAGTTTGTATTAACGGGCTTA |
| | | | TGTTGCTCGAAATCAAAGACACAGAAAAGTACTGTGC |
| | | | CCTTGCACCTAATATGATGGTAACAAACAATACCTTCA |
| | | | CACTCAAAGGCGGTGCACCAACAAAGGTTACTTTTGG |
| | | | TGATGACACTGTGATAGAAGTGCAAGGTTACAAGAGT |
| | | | GTGAATATCACTTTTGAACTTGATGAAAGGATTGATA |
| | | | AAGTACTTAATGAGAAGTGCTCTGCCTATACAGTTGA |
| | | | ACTCGGTACAGAAGTAAATGAGTTCGCCTGTGTTGTG |
| | | | GCAGATGCTGTCATAAAAACTTTGCAACCAGTATCTG |
| | | | AATTACTTACACCACTGGGCATTGATTTAGATGAGTGG |
| | | | AGTATGGCTACATACTACTTATTTGATGAGTCTGGTGA |
| | | | GTTTAAATTGGCTTCACATATGTATTGTTCTTTCTACCC |
| | | | TCCAGATGAGGATGAAGAAGAAGGTGATTGTGAAGA |
| | | | AGAAGAGTTTGAGCCATCAACTCAATATGAGTATGGT |
| | | | ACTGAAGATGATTACCAAGGTAAACCTTTGGAATTTG |
| | | | GTGCCACTTCTGCTGCTCTTCAACCTGAAGAAGAGCA |
| | | | AGAAGAAGATTGGTTAGATGATGATAGTCAACAAACT |
| | | | GTTGGTCAACAAGACGGCAGTGAGGACAATCAGACAA |
| | | | CTACTATTCAAACAATTGTTGAGGTTCAACCTCAATTA |
| | | | GAGATGGAACTTACACCAGTTGTTCAGACTATTGAAG |
| | | | TGAATAGTTTTAGTGGTTATTTAAAACTTACTGACAAT |
| | | | GTATACATTAAAAATGCAGACATTGTGGAAGAAGCTA |
| | | | AAAAGGTAAAACCAACAGTGGTTGTTAATGCAGCCAA |
| | | | TGTTTACCTTAAACATGGAGGAGGTGTTGCAGGAGCC |
| | | | TTAAATAAGGCTACTAACAATGCCATGCAAGTTGAAT |
| | | | CTGATGATTACATAGCTACTAATGGACCACTTAAAGT |
| | | | GGGTGGTAGTTGTGTTTTAAGCGGACACAATCTTGCTA |
| | | | AACACTGTCTTCATGTTGTCGGCCCAAATGTTAACAAA |
| | | | GGTGAAGACATTCAACTTCTTAAGAGTGCTTATGAAA |
| | | | ATTTTAATCAGCACGAAGTTCTACTTGCACCATTATTA |
| | | | TCAGCTGGTATTTTTGGTGCTGACCCTATACATTCTTT |
| | | | AAGAGTTTGTGTAGATACTGTTCGCACAAATGTCTACT |
| | | | TAGCTGTCTTTGATAAAAATCTCTATGACAAACTTGTT |
| | | | TCAAGCTTTTTGGAAATGAAGAGTGAAAAGCAAGTTG |
| | | | AACAAAAGATCGCTGAGATTCCTAAAGAGGAAGTTAA |
| | | | GCCATTTATAACTGAAAGTAAACCTTCAGTTGAACAG |
| | | | AGAAAACAAGATGATAAGAAAATCAAAGCTTGTGTTG |
| | | | AAGAAGTTACAACAACTCTGGAAGAAACTAAGTTCCT |
| | | | CACAGAAAACTTGTTACTTTATATTGACATTAATGGCA |
| | | | ATCTTCATCCAGATTCTGCCACTCTTGTTAGTGACATT |
| | | | GACATCACTTTCTTAAAGAAAGATGCTCCATATATAGT |
| | | | GGGTGATGTTGTTCAAGAGGGTGTTTTAACTGCTGTGG |
| | | | TTATACCTACTAAAAAGGCTGGTGGCACTACTGAAAT |
| | | | GCTAGCGAAAGCTTTGAGAAAAGTGCCAACAGACAAT |
| | | | TATATAACCACTTACCCGGGTCAGGGTTTAAATGGTTA |
| | | | CACTGTAGAGGAGGCAAAGACAGTGCTTAAAAAGTGT |
| | | | AAAAGTGCCTTTTACATTCTACCATCTATTATCTCTAA |
| | | | TGAGAAGCAAGAAATTCTTGGAACTGTTTCTTGGAATT |
| | | | TGCGAGAAATGCTTGCACATGCAGAAGAAACACGCAA |
| | | | ATTAATGCCTGTCTGTGTGGAAACTAAAGCCATAGTTT |
| | | | CAACTATACAGCGTAAATATAAGGGTATTAAAATACA |
| | | | AGAGGGTGTGGTTGATTATGGTGCTAGATTTTACTTTT |
| | | | ACACCAGTAAAACAACTGTAGCGTCACTTATCAACAC |
| | | | ACTTAACGATCTAAATGAAACTCTTGTTACAATGCCAC |
| | | | TTGGCTATGTAACACATGGCTTAAATTTGGAAGAAGC |
| | | | TGCTCGGTATATGAGATCTCTCAAAGTGCCAGCTACA |
| | | | GTTTCTGTTTCTTCACCTGATGCTGTTACAGCGTATAA |
| | | | TGGTTATCTTACTTCTTCTTCTAAAACACCTGAAGAAC |
| | | | ATTTTATTGAAACCATCTCACTTGCTGGTTCCTATAAA |
| | | | GATTGGTCCTATTCTGGACAATCTACACAACTAGGTAT |
| | | | AGAATTTCTTAAGAGAGGTGATAAAAGTGTATATTAC |
| | | | ACTAGTAATCCTACCACATTCCACCTAGATGGTGAAGT |
| | | | TATCACCTTTGACAATCTTAAGACACTTCTTTCTTTGA |
| | | | GAGAAGTGAGGACTATTAAGGTGTTTACAACAGTAGA |
| | | | CAACATTAACCTCCACACGCAAGTTGTGGACATGTCA |
| | | | ATGACATATGGACAACAGTTTGGTCCAACTTATTTGGA |
| | | | TGGAGCTGATGTTACTAAAATAAAACCTCATAATTCA |
| | | | CATGAAGGTAAAACATTTTATGTTTTACCTAATGATGA |
| | | | CACTCTACGTGTTGAGGCTTTTGAGTACTACCACACAA |
| | | | CTGATCCTAGTTTTCTGGGTAGGTACATGTCAGCATTA |
| | | | AATCACACTAAAAAGTGGAAATACCCACAAGTTAATG |
| | | | GTTTAACTTCTATTAAATGGGCAGATAACAACTGTTAT |
| | | | CTTGCCACTGCATTGTTAACACTCCAACAAATAGAGTT |
| | | | GAAGTTTAATCCACCTGCTCTACAAGATGCTTATTACA |
| | | | GAGCAAGGGCTGGTGAAGCTGCTAACTTTTGTGCACT |
| | | | TATCTTAGCCTACTGTAATAAGACAGTAGGTGAGTTA |
| | | | GGTGATGTTAGAGAAACAATGAGTTACTTGTTTCAAC |
| | | | ATGCCAATTTAGATTCTTGCAAAAGAGTCTTGAACGTG |
| | | | GTGTGTAAAACTTGTGGACAACAGCAGACAACCCTTA |
| | | | AGGGTGTAGAAGCTGTTATGTACATGGGCACACTTTCT |
| | | | TATGAACAATTTAAGAAAGGTGTTCAGATACCTTGTA |
| | | | CGTGTGGTAAACAAGCTACAAAATATCTAGTACAACA |
| | | | GGAGTCACCTTTTGTTATGATGTCAGCACCACCTGCTC |
| | | | AGTATGAACTTAAGCATGGTACATTTACTTGTGCTAGT |
| | | | GAGTACACTGGTAATTACCAGTGTGGTCACTATAAAC |
| | | | ATATAACTTCTAAAGAAACTTTGTATTGCATAGACGGT |
| | | | GCTTTACTTACAAAGTCCTCAGAATACAAAGGTCCTAT |
| | | | TACGGATGTTTTCTACAAAGAAAACAGTTACACAACA |
| | | | ACCATAAAACCAGTTACTTATAAATTGGATGGTGTTGT |
| | | | TTGTACAGAAATTGACCCTAAGTTGGACAATTATTATA |
| | | | AGAAAGACAATTCTTATTTCACAGAGCAACCAATTGA |
| | | | TCTTGTACCAAACCAACCATATCCAAACGCAAGCTTC |
| | | | GATAATTTTAAGTTTGTATGTGATAATATCAAATTTGC |
| | | | TGATGATTTAAACCAGTTAACTGGTTATAAGAAACCT |
| | | | GCTTCAAGAGAGCTTAAAGTTACATTTTTCCCTGACTT |
| | | | AAATGGTGATGTGGTGGCTATTGATTATAAACACTAC |
| | | | ACACCCTCTTTTAAGAAAGGAGCTAAATTGTTACATA |
| | | | AACCTATTGTTTGGCATGTTAACAATGCAACTAATAAA |
| | | | GCCACGTATAAACCAAATACCTGGTGTATACGTTGTCT |
| | | | TTGGAGCACAAAACCAGTTGAAACATCAAATTCGTTT |
| | | | GATGTACTGAAGTCAGAGGACGCGCAGGGAATGGATA |
| | | | ATCTTGCCTGCGAAGATCTAAAACCAGTCTCTGAAGA |
| | | | AGTAGTGGAAAATCCTACCATACAGAAAGACGTTCTT |
| | | | GAGTGTAATGTGAAAACTACCGAAGTTGTAGGAGACA |
| | | | TTATACTTAAACCAGCAAATAATAGTTTAAAAATTAC |
| | | | AGAAGAGGTTGGCCACACAGATCTAATGGCTGCTTAT |
| | | | GTAGACAATTCTAGTCTTACTATTAAGAAACCTAATGA |
| | | | ATTATCTAGAGTATTAGGTTTGAAAACCCTTGCTACTC |
| | | | ATGGTTTAGCTGCTGTTAATAGTGTCCCTTGGGATACT |
| | | | ATAGCTAATTATGCTAAGCCTTTTCTTAACAAAGTTGT |
| | | | TAGTACAACTACTAACATAGTTACACGGTGTTTAAACC |
| | | | GTGTTTGTACTAATTATATGCCTTATTTCTTTACTTTAT |
| | | | TGCTACAATTGTGTACTTTTACTAGAAGTACAAATTCT |
| | | | AGAATTAAAGCATCTATGCCGACTACTATAGCAAAGA |
| | | | ATACTGTTAAGAGTGTCGGTAAATTTTGTCTAGAGGCT |
| | | | TCATTTAATTATTTGAAGTCACCTAATTTTTCTAAACT |
| | | | GATAAATATTATAATTTGGTTTTTACTATTAAGTGTTT |
| | | | GCCTAGGTTCTTTAATCTACTCAACCGCTGCTTTAGGT |
| | | | GTTTTAATGTCTAATTTAGGCATGCCTTCTTACTGTACT |
| | | | GGTTACAGAGAAGGCTATTTGAACTCTACTAATGTCA |
| | | | CTATTGCAACCTACTGTACTGGTTCTATACCTTGTAGT |
| | | | GTTTGTCTTAGTGGTTTAGATTCTTTAGACACCTATCCT |
| | | | TCTTTAGAAACTATACAAATTACCATTTCATCTTTTAA |
| | | | ATGGGATTTAACTGCTTTTGGCTTAGTTGCAGAGTGGT |
| | | | TTTTGGCATATATTCTTTTCACTAGGTTTTTCTATGTAC |
| | | | TTGGATTGGCTGCAATCATGCAATTGTTTTTCAGCTAT |
| | | | TTTGCAGTACATTTTATTAGTAATTCTTGGCTTATGTG |
| | | | GTTAATAATTAATCTTGTACAAATGGCCCCGATTTCAG |
| | | | CTATGGTTAGAATGTACATCTTCTTTGCATCATTTTATT |
| | | | ATGTATGGAAAAGTTATGTGCATGTTGTAGACGGTTGT |
| | | | AATTCATCAACTTGTATGATGTGTTACAAACGTAATAG |
| | | | AGCAACAAGAGTCGAATGTACAACTATTGTTAATGGT |
| | | | GTTAGAAGGTCCTTTTATGTCTATGCTAATGGAGGTAA |
| | | | AGGCTTTTGCAAACTACACAATTGGAATTGTGTTAATT |
| | | | GTGATACATTCTGTGCTGGTAGTACATTTATTAGTGAT |
| | | | GAAGTTGCGAGAGACTTGTCACTACAGTTTAAAAGAC |
| | | | CAATAAATCCTACTGACCAGTCTTCTTACATCGTTGAT |
| | | | AGTGTTACAGTGAAGAATGGTTCCATCCATCTTTACTT |
| | | | TGATAAAGCTGGTCAAAAGACTTATGAAAGACATTCT |
| | | | CTCTCTCATTTTGTTAACTTAGACAACCTGAGAGCTAA |
| | | | TAACACTAAAGGTTCATTGCCTATTAATGTTATAGTTT |
| | | | TTGATGGTAAATCAAAATGTGAAGAATCATCTGCAAA |
| | | | ATCAGCGTCTGTTTACTACAGTCAGCTTATGTGTCAAC |
| | | | CTATACTGTTACTAGATCAGGCATTAGTGTCTGATGTT |
| | | | GGTGATAGTGCGGAAGTTGCAGTTAAAATGTTTGATG |
| | | | CTTACGTTAATACGTTTTCATCAACTTTTAACGTACCA |
| | | | ATGGAAAAACTCAAAACACTAGTTGCAACTGCAGAAG |
| | | | CTGAACTTGCAAAGAATGTGTCCTTAGACAATGTCTTA |
| | | | TCTACTTTTATTTCAGCAGCTCGGCAAGGGTTTGTTGA |
| | | | TTCAGATGTAGAAACTAAAGATGTTGTTGAATGTCTTA |
| | | | AATTGTCACATCAATCTGACATAGAAGTTACTGGCGA |
| | | | TAGTTGTAATAACTATATGCTCACCTATAACAAAGTTG |
| | | | AAAACATGACACCCCGTGACCTTGGTGCTTGTATTGAC |
| | | | TGTAGTGCGCGTCATATTAATGCGCAGGTAGCAAAAA |
| | | | GTCACAACATTGCTTTGATATGGAACGTTAAAGATTTC |
| | | | ATGTCATTGTCTGAACAACTACGAAAACAAATACGTA |
| | | | GTGCTGCTAAAAAGAATAACTTACCTTTTAAGTTGACA |
| | | | TGTGCAACTACTAGACAAGTTGTTAATGTTGTAACAAC |
| | | | AAAGATAGCACTTAAGGGTGGTAAAATTGTTAATAAT |
| | | | TGGTTGAAGCAGTTAATTAAAGTTACACTTGTGTTCCT |
| | | | TTTTGTTGCTGCTATTTTCTATTTAATAACACCTGTTCA |
| | | | TGTCATGTCTAAACATACTGACTTTTCAAGTGAAATCA |
| | | | TAGGATACAAGGCTATTGATGGTGGTGTCACTCGTGA |
| | | | CATAGCATCTACAGATACTTGTTTTGCTAACAAACATG |
| | | | CTGATTTTGACACATGGTTTAGCCAGCGTGGTGGTAGT |
| | | | TATACTAATGACAAAGCTTGCCCATTGATTGCTGCAGT |
| | | | CATAACAAGAGAAGTGGGTTTTGTCGTGCCTGGTTTGC |
| | | | CTGGCACGATATTACGCACAACTAATGGTGACTTTTTG |
| | | | CATTTCTTACCTAGAGTTTTTAGTGCAGTTGGTAACAT |
| | | | CTGTTACACACCATCAAAACTTATAGAGTACACTGACT |
| | | | TTGCAACATCAGCTTGTGTTTTGGCTGCTGAATGTACA |
| | | | ATTTTTAAAGATGCTTCTGGTAAGCCAGTACCATATTG |
| | | | TTATGATACCAATGTACTAGAAGGTTCTGTTGCTTATG |
| | | | AAAGTTTACGCCCTGACACACGTTATGTGCTCATGGAT |
| | | | GGCTCTATTATTCAATTTCCTAACACCTACCTTGAAGG |
| | | | TTCTGTTAGAGTGGTAACAACTTTTGATTCTGAGTACT |
| | | | GTAGGCACGGCACTTGTGAAAGATCAGAAGCTGGTGT |
| | | | TTGTGTATCTACTAGTGGTAGATGGGTACTTAACAATG |
| | | | ATTATTACAGATCTTTACCAGGAGTTTTCTGTGGTGTA |
| | | | GATGCTGTAAATTTACTTACTAATATGTTTACACCACT |
| | | | AATTCAACCTATTGGTGCTTTGGACATATCAGCATCTA |
| | | | TAGTAGCTGGTGGTATTGTAGCTATCGTAGTAACATGC |
| | | | CTTGCCTACTATTTTATGAGGTTTAGAAGAGCTTTTGG |
| | | | TGAATACAGTCATGTAGTTGCCTTTAATACTTTACTAT |
| | | | TCCTTATGTCATTCACTGTACTCTGTTTAACACCAGTTT |
| | | | ACTCATTCTTACCTGGTGTTTATTCTGTTATTTACTTGT |
| | | | ACTTGACATTTTATCTTACTAATGATGTTTCTTTTTTAG |
| | | | CACATATTCAGTGGATGGTTATGTTCACACCTTTAGTA |
| | | | CCTTTCTGGATAACAATTGCTTATATCATTTGTATTTCC |
| | | | ACAAAGCATTTCTATTGGTTCTTTAGTAATTACCTAAA |
| | | | GAGACGTGTAGTCTTTAATGGTGTTTCCTTTAGTACTT |
| | | | TTGAAGAAGCTGCGCTGTGCACCTTTTTGTTAAATAAA |
| | | | GAAATGTATCTAAAGTTGCGTAGTGATGTGCTATTACC |
| | | | TCTTACGCAATATAATAGATACTTAGCTCTTTATAATA |
| | | | AGTACAAGTATTTTAGTGGAGCAATGGATACAACTAG |
| | | | CTACAGAGAAGCTGCTTGTTGTCATCTCGCAAAGGCTC |
| | | | TCAATGACTTCAGTAACTCAGGTTCTGATGTTCTTTAC |
| | | | CAACCACCACAAACCTCTATCACCTCAGCTGTTTTGCA |
| | | | GAGTGGTTTTAGAAAAATGGCATTCCCATCTGGTAAA |
| | | | GTTGAGGGTTGTATGGTACAAGTAACTTGTGGTACAA |
| | | | CTACACTTAACGGTCTTTGGCTTGATGACGTAGTTTAC |
| | | | TGTCCAAGACATGTGATCTGCACCTCTGAAGACATGCT |
| | | | TAACCCTAATTATGAAGATTTACTCATTCGTAAGTCTA |
| | | | ATCATAATTTCTTGGTACAGGCTGGTAATGTTCAACTC |
| | | | AGGGTTATTGGACATTCTATGCAAAATTGTGTACTTAA |
| | | | GCTTAAGGTTGATACAGCCAATCCTAAGACACCTAAG |
| | | | TATAAGTTTGTTCGCATTCAACCAGGACAGACTTTTTC |
| | | | AGTGTTAGCTTGTTACAATGGTTCACCATCTGGTGTTT |
| | | | ACCAATGTGCTATGAGGCCCAATTTCACTATTAAGGGT |
| | | | TCATTCCTTAATGGTTCATGTGGTAGTGTTGGTTTTAA |
| | | | CATAGATTATGACTGTGTCTCTTTTTGTTACATGCACC |
| | | | ATATGGAATTACCAACTGGAGTTCATGCTGGCACAGA |
| | | | CTTAGAAGGTAACTTTTATGGACCTTTTGTTGACAGGC |
| | | | AAACAGCACAAGCAGCTGGTACGGACACAACTATTAC |
| | | | AGTTAATGTTTTAGCTTGGTTGTACGCTGCTGTTATAA |
| | | | ATGGAGACAGGTGGTTTCTCAATCGATTTACCACAACT |
| | | | CTTAATGACTTTAACCTTGTGGCTATGAAGTACAATTA |
| | | | TGAACCTCTAACACAAGACCATGTTGACATACTAGGA |
| | | | CCTCTTTCTGCTCAAACTGGAATTGCCGTTTTAGATAT |
| | | | GTGTGCTTCATTAAAAGAATTACTGCAAAATGGTATG |
| | | | AATGGACGTACCATATTGGGTAGTGCTTTATTAGAAG |
| | | | ATGAATTTACACCTTTTGATGTTGTTAGACAATGCTCA |
| | | | GGTGTTACTTTCCAAAGTGCAGTGAAAAGAACAATCA |
| | | | AGGGTACACACCACTGGTTGTTACTCACAATTTTGACT |
| | | | TCACTTTTAGTTTTAGTCCAGAGTACTCAATGGTCTTT |
| | | | GTTCTTTTTTTTGTATGAAAATGCCTTTTTACCTTTTGC |
| | | | TATGGGTATTATTGCTATGTCTGCTTTTGCAATGATGT |
| | | | TTGTCAAACATAAGCATGCATTTCTCTGTTTGTTTTTGT |
| | | | TACCTTCTCTTGCCACTGTAGCTTATTTTAATATGGTCT |
| | | | ATATGCCTGCTAGTTGGGTGATGCGTATTATGACATGG |
| | | | TTGGATATGGTTGATACTAGTTTGTCTGGTTTTAAGCT |
| | | | AAAAGACTGTGTTATGTATGCATCAGCTGTAGTGTTAC |
| | | | TAATCCTTATGACAGCAAGAACTGTGTATGATGATGG |
| | | | TGCTAGGAGAGTGTGGACACTTATGAATGTCTTGACA |
| | | | CTCGTTTATAAAGTTTATTATGGTAATGCTTTAGATCA |
| | | | AGCCATTTCCATGTGGGCTCTTATAATCTCTGTTACTT |
| | | | CTAACTACTCAGGTGTAGTTACAACTGTCATGTTTTTG |
| | | | GCCAGAGGTATTGTTTTTATGTGTGTTGAGTATTGCCC |
| | | | TATTTTCTTCATAACTGGTAATACACTTCAGTGTATAA |
| | | | TGCTAGTTTATTGTTTCTTAGGCTATTTTTGTACTTGTT |
| | | | ACTTTGGCCTCTTTTGTTTACTCAACCGCTACTTTAGAC |
| | | | TGACTCTTGGTGTTTATGATTACTTAGTTTCTACACAG |
| | | | GAGTTTAGATATATGAATTCACAGGGACTACTCCCAC |
| | | | CCAAGAATAGCATAGATGCCTTCAAACTCAACATTAA |
| | | | ATTGTTGGGTGTTGGTGGCAAACCTTGTATCAAAGTAG |
| | | | CCACTGTACAGTCTAAAATGTCAGATGTAAAGTGCAC |
| | | | ATCAGTAGTCTTACTCTCAGTTTTGCAACAACTCAGAG |
| | | | TAGAATCATCATCTAAATTGTGGGCTCAATGTGTCCAG |
| | | | TTACACAATGACATTCTCTTAGCTAAAGATACTACTGA |
| | | | AGCCTTTGAAAAAATGGTTTCACTACTTTCTGTTTTGC |
| | | | TTTCCATGCAGGGTGCTGTAGACATAAACAAGCTTTGT |
| | | | GAAGAAATGCTGGACAACAGGGCAACCTTACAAGCTA |
| | | | TAGCCTCAGAGTTTAGTTCCCTTCCATCATATGCAGCT |
| | | | TTTGCTACTGCTCAAGAAGCTTATGAGCAGGCTGTTGC |
| | | | TAATGGTGATTCTGAAGTTGTTCTTAAAAAGTTGAAGA |
| | | | AGTCTTTGAATGTGGCTAAATCTGAATTTGACCGTGAT |
| | | | GCAGCCATGCAACGTAAGTTGGAAAAGATGGCTGATC |
| | | | AAGCTATGACCCAAATGTATAAACAGGCTAGATCTGA |
| | | | GGACAAGAGGGCAAAAGTTACTAGTGCTATGCAGACA |
| | | | ATGCTTTTCACTATGCTTAGAAAGTTGGATAATGATGC |
| | | | ACTCAACAACATTATCAACAATGCAAGAGATGGTTGT |
| | | | GTTCCCTTGAACATAATACCTCTTACAACAGCAGCCAA |
| | | | ACTAATGGTTGTCATACCAGACTATAACACATATAAA |
| | | | AATACGTGTGATGGTACAACATTTACTTATGCATCAGC |
| | | | ATTGTGGGAAATCCAACAGGTTGTAGATGCAGATAGT |
| | | | AAAATTGTTCAACTTAGTGAAATTAGTATGGACAATTC |
| | | | ACCTAATTTAGCATGGCCTCTTATTGTAACAGCTTTAA |
| | | | GGGCCAATTCTGCTGTCAAATTACAGAATAATGAGCT |
| | | | TAGTCCTGTTGCACTACGACAGATGTCTTGTGCTGCCG |
| | | | GTACTACACAAACTGCTTGCACTGATGACAATGCGTT |
| | | | AGCTTACTACAACACAACAAAGGGAGGTAGGTTTGTA |
| | | | CTTGCACTGTTATCCGATTTACAGGATTTGAAATGGGC |
| | | | TAGATTCCCTAAGAGTGATGGAACTGGTACTATCTATA |
| | | | CAGAACTGGAACCACCTTGTAGGTTTGTTACAGACAC |
| | | | ACCTAAAGGTCCTAAAGTGAAGTATTTATACTTTATTA |
| | | | AAGGATTAAACAACCTAAATAGAGGTATGGTACTTGG |
| | | | TAGTTTAGCTGCCACAGTACGTCTACAAGCTGGTAATG |
| | | | CAACAGAAGTGCCTGCCAATTCAACTGTATTATCTTTC |
| | | | TGTGCTTTTGCTGTAGATGCTGCTAAAGCTTACAAAGA |
| | | | TTATCTAGCTAGTGGGGGACAACCAATCACTAATTGT |
| | | | GTTAAGATGTTGTGTACACACACTGGTACTGGTCAGG |
| | | | CAATAACAGTTACACCGGAAGCCAATATGGATCAAGA |
| | | | ATCCTTTGGTGGTGCATCGTGTTGTCTGTACTGCCGTT |
| | | | GCCACATAGATCATCCAAATCCTAAAGGATTTTGTGA |
| | | | CTTAAAAGGTAAGTATGTACAAATACCTACAACTTGT |
| | | | GCTAATGACCCTGTGGGTTTTACACTTAAAAACACAGT |
| | | | CTGTACCGTCTGCGGTATGTGGAAAGGTTATGGCTGTA |
| | | | GTTGTGATCAACTCCGCGAACCCATGCTTCAGTCAGCT |
| | | | GATGCACAATCGTTTTTAAACGGGTTTGCGGTGTAAGT |
| | | | GCAGCCCGTCTTACACCGTGCGGCACAGGCACTAGTA |
| | | | CTGATGTCGTATACAGGGCTTTTGACATCTACAATGAT |
| | | | AAAGTAGCTGGTTTTGCTAAATTCCTAAAAACTAATTG |
| | | | TTGTCGCTTCCAAGAAAAGGACGAAGATGACAATTTA |
| | | | ATTGATTCTTACTTTGTAGTTAAGAGACACACTTTCTC |
| | | | TAACTACCAACATGAAGAAACAATTTATAATTTACTTA |
| | | | AGGATTGTCCAGCTGTTGCTAAACATGACTTCTTTAAG |
| | | | TTTAGAATAGACGGTGACATGGTACCACATATATCAC |
| | | | GTCAACGTCTTACTAAATACACAATGGCAGACCTCGT |
| | | | CTATGCTTTAAGGCATTTTGATGAAGGTAATTGTGACA |
| | | | CATTAAAAGAAATACTTGTCACATACAATTGTTGTGAT |
| | | | GATGATTATTTCAATAAAAAGGACTGGTATGATTTTGT |
| | | | AGAAAACCCAGATATATTACGCGTATACGCCAACTTA |
| | | | GGTGAACGTGTACGCCAAGCTTTGTTAAAAACAGTAC |
| | | | AATTCTGTGATGCCATGCGAAATGCTGGTATTGTTGGT |
| | | | GTACTGACATTAGATAATCAAGATCTCAATGGTAACT |
| | | | GGTATGATTTCGGTGATTTCATACAAACCACGCCAGGT |
| | | | AGTGGAGTTCCTGTTGTAGATTCTTATTATTCATTGTT |
| | | | AATGCCTATATTAACCTTGACCAGGGCTTTAACTGCAG |
| | | | AGTCACATGTTGACACTGACTTAACAAAGCCTTACATT |
| | | | AAGTGGGATTTGTTAAAATATGACTTCACGGAAGAGA |
| | | | GGTTAAAACTCTTTGACCGTTATTTTAAATATTGGGAT |
| | | | CAGACATACCACCCAAATTGTGTTAACTGTTTGGATGA |
| | | | CAGATGCATTCTGCATTGTGCAAACTTTAATGTTTTAT |
| | | | TCTCTACAGTGTTCCCACCTACAAGTTTTGGACCACTA |
| | | | GTGAGAAAAATATTTGTTGATGGTGTTCCATTTGTAGT |
| | | | TTCAACTGGATACCACTTCAGAGAGCTAGGTGTTGTAC |
| | | | ATAATCAGGATGTAAACTTACATAGCTCTAGACTTAGT |
| | | | TTTAAGGAATTACTTGTGTATGCTGCTGACCCTGCTAT |
| | | | GCACGCTGCTTCTGGTAATCTATTACTAGATAAACGCA |
| | | | CTACGTGCTTTTCAGTAGCTGCACTTACTAACAATGTT |
| | | | GCTTTTCAAACTGTCAAACCCGGTAATTTTAACAAAGA |
| | | | CTTCTATGACTTTGCTGTGTCTAAGGGTTTCTTTAAGG |
| | | | AAGGAAGTTCTGTTGAATTAAAACACTTCTTCTTTGCT |
| | | | CAGGATGGTAATGCTGCTATCAGCGATTATGACTACT |
| | | | ATCGTTATAATCTACCAACAATGTGTGATATCAGACA |
| | | | ACTACTATTTGTAGTTGAAGTTGTTGATAAGTACTTTG |
| | | | ATTGTTACGATGGTGGCTGTATTAATGCTAACCAAGTC |
| | | | ATCGTCAACAACCTAGACAAATCAGCTGGTTTTCCATT |
| | | | TAATAAATGGGGTAAGGCTAGACTTTATTATGATTCA |
| | | | ATGAGTTATGAGGATCAAGATGCACTTTTCGCATATAC |
| | | | AAAACGTAATGTCATCCCTACTATAACTCAAATGAAT |
| | | | CTTAAGTATGCCATTAGTGCAAAGAATAGAGCTCGCA |
| | | | CCGTAGCTGGTGTCTCTATCTGTAGTACTATGACCAAT |
| | | | AGACAGTTTCATCAAAAATTATTGAAATCAATAGCCG |
| | | | CCACTAGAGGAGCTACTGTAGTAATTGGAACAAGCAA |
| | | | ATTCTATGGTGGTTGGCACAACATGTTAAAAACTGTTT |
| | | | ATAGTGATGTAGAAAACCCTCACCTTATGGGTTGGGA |
| | | | TTATCCTAAATGTGATAGAGCCATGCCTAACATGCTTA |
| | | | GAATTATGGCCTCACTTGTTCTTGCTCGCAAACATACA |
| | | | ACGTGTTGTAGCTTGTCACACCGTTTCTATAGATTAGC |
| | | | TAATGAGTGTGCTCAAGTATTGAGTGAAATGGTCATG |
| | | | TGTGGCGGTTCACTATATGTTAAACCAGGTGGAACCTC |
| | | | ATCAGGAGATGCCACAACTGCTTATGCTAATAGTGTTT |
| | | | TTAACATTTGTCAAGCTGTCACGGCCAATGTTAATGCA |
| | | | CTTTTATCTACTGATGGTAACAAAATTGCCGATAAGTA |
| | | | TGTCCGCAATTTACAACACAGACTTTATGAGTGTCTCT |
| | | | ATAGAAATAGAGATGTTGACACAGACTTTGTGAATGA |
| | | | GTTTTACGCATATTTGCGTAAACATTTCTCAATGATGA |
| | | | TACTCTCTGACGATGCTGTTGTGTGTTTCAATAGCACT |
| | | | TATGCATCTCAAGGTCTAGTGGCTAGCATAAAGAACT |
| | | | TTAAGTCAGTTCTTTATTATCAAAACAATGTTTTTATG |
| | | | TCTGAAGCAAAATGTTGGACTGAGACTGACCTTACTA |
| | | | AAGGACCTCATGAATTTTGCTCTCAACATACAATGCTA |
| | | | GTTAAACAGGGTGATGATTATGTGTACCTTCCTTACCC |
| | | | AGATCCATCAAGAATCCTAGGGGCCGGCTGTTTTGTA |
| | | | GATGATATCGTAAAAACAGATGGTACACTTATGATTG |
| | | | AACGGTTCGTGTCTTTAGCTATAGATGCTTACCCACTT |
| | | | ACTAAACATCCTAATCAGGAGTATGCTGATGTCTTTCA |
| | | | TTTGTACTTACAATACATAAGAAAGCTACATGATGAG |
| | | | TTAACAGGACACATGTTAGACATGTATTCTGTTATGCT |
| | | | TACTAATGATAACACTTCAAGGTATTGGGAACCTGAG |
| | | | TTTTATGAGGCTATGTACACACCGCATACAGTCTTACA |
| | | | GGCTGTTGGGGCTTGTGTTCTTTGCAATTCACAGACTT |
| | | | CATTAAGATGTGGTGCTTGCATACGTAGACCATTCTTA |
| | | | TGTTGTAAATGCTGTTACGACCATGTCATATCAACATC |
| | | | ACATAAATTAGTCTTGTCTGTTAATCCGTATGTTTGCA |
| | | | ATGCTCCAGGTTGTGATGTCACAGATGTGACTCAACTT |
| | | | TACTTAGGAGGTATGAGCTATTATTGTAAATCACATAA |
| | | | ACCACCCATTAGTTTTCCATTGTGTGCTAATGGACAAG |
| | | | TTTTTGGTTTATATAAAAATACATGTGTTGGTAGCGAT |
| | | | AATGTTACTGACTTTAATGCAATTGCAACATGTGACTG |
| | | | GACAAATGCTGGTGATTACATTTTAGCTAACACCTGTA |
| | | | CTGAAAGACTCAAGCTTTTTGCAGCAGAAACGCTCAA |
| | | | AGCTACTGAGGAGACATTTAAACTGTCTTATGGTATTG |
| | | | CTACTGTACGTGAAGTGCTGTCTGACAGAGAATTACA |
| | | | TCTTTCATGGGAAGTTGGTAAACCTAGACCACCACTTA |
| | | | ACCGAAATTATGTCTTTACTGGTTATCGTGTAACTAAA |
| | | | AACAGTAAAGTACAAATAGGAGAGTACACCTTTGAAA |
| | | | AAGGTGACTATGGTGATGCTGTTGTTTACCGAGGTAC |
| | | | AACAACTTACAAATTAAATGTTGGTGATTATTTTGTGC |
| | | | TGACATCACATACAGTAATGCCATTAAGTGCACCTAC |
| | | | ACTAGTGCCACAAGAGCACTATGTTAGAATTACTGGC |
| | | | TTATACCCAACACTCAATATCTCAGATGAGTTTTCTAG |
| | | | CAATGTTGCAAATTATCAAAAGGTTGGTATGCAAAAG |
| | | | TATTCTACACTCCAGGGACCACCTGGTACTGGTAAGA |
| | | | GTCATTTTGCTATTGGCCTAGCTCTCTACTACCCTTCTG |
| | | | CTCGCATAGTGTATACAGCTTGCTCTCATGCCGCTGTT |
| | | | GATGCACTATGTGAGAAGGCATTAAAATATTTGCCTA |
| | | | TAGATAAATGTAGTAGAATTATACCTGCACGTGCTCGT |
| | | | GTAGAGTGTTTTGATAAATTCAAAGTGAATTCAACATT |
| | | | AGAACAGTATGTCTTTTGTACTGTAAATGCATTGCCTG |
| | | | AGACGACAGCAGATATAGTTGTCTTTGATGAAATTTC |
| | | | AATGGCCACAAATTATGATTTGAGTGTTGTCAATGCCA |
| | | | GATTACGTGCTAAGCACTATGTGTACATTGGCGACCCT |
| | | | GCTCAATTACCTGCACCACGCACATTGCTAACTAAGG |
| | | | GCACACTAGAACCAGAATATTTCAATTCAGTGTGTAG |
| | | | ACTTATGAAAACTATAGGTCCAGACATGTTCCTCGGA |
| | | | ACTTGTCGGCGTTGTCCTGCTGAAATTGTTGACACTGT |
| | | | GAGTGCTTTGGTTTATGATAATAAGCTTAAAGCACATA |
| | | | AAGACAAATCAGCTCAATGCTTTAAAATGTTTTATAA |
| | | | GGGTGTTATCACGCATGATGTTTCATCTGCAATTAACA |
| | | | GGCCACAAATAGGCGTGGTAAGAGAATTCCTTACACG |
| | | | TAACCCTGCTTGGAGAAAAGCTGTCTTTATTTCACCTT |
| | | | ATAATTCACAGAATGCTGTAGCCTCAAAGATTTTGGG |
| | | | ACTACCAACTCAAACTGTTGATTCATCACAGGGCTCA |
| | | | GAATATGACTATGTCATATTCACTCAAACCACTGAAA |
| | | | CAGCTCACTCTTGTAATGTAAACAGATTTAATGTTGCT |
| | | | ATTACCAGAGCAAAAGTAGGCATACTTTGCATAATGT |
| | | | CTGATAGAGACCTTTATGACAAGTTGCAATTTACAAGT |
| | | | CTTGAAATTCCACGTAGGAATGTGGCAACTTTACAAG |
| | | | CTGAAAATGTAACAGGACTCTTTAAAGATTGTAGTAA |
| | | | GGTAATCACTGGGTTACATCCTACACAGGCACCTACA |
| | | | CACCTCAGTGTTGACACTAAATTCAAAACTGAAGGTTT |
| | | | ATGTGTTGACATACCTGGCATACCTAAGGACATGACC |
| | | | TATAGAAGACTCATCTCTATGATGGGTTTTAAAATGAA |
| | | | TTATCAAGTTAATGGTTACCCTAACATGTTTATCACCC |
| | | | GCGAAGAAGCTATAAGACATGTACGTGCATGGATTGG |
| | | | CTTCGATGTCGAGGGGTGTCATGCTACTAGAGAAGCT |
| | | | GTTGGTACCAATTTACCTTTACAGCTAGGTTTTTCTAC |
| | | | AGGTGTTAACCTAGTTGCTGTACCTACAGGTTATGTTG |
| | | | ATACACCTAATAATACAGATTTTTCCAGAGTTAGTGCT |
| | | | AAACCACCGCCTGGAGATCAATTTAAACACCTCATAC |
| | | | CACTTATGTACAAAGGACTTCCTTGGAATGTAGTGCGT |
| | | | ATAAAGATTGTACAAATGTTAAGTGACACACTTAAAA |
| | | | ATCTCTCTGACAGAGTCGTATTTGTCTTATGGGCACAT |
| | | | GGCTTTGAGTTGACATCTATGAAGTATTTTGTGAAAAT |
| | | | AGGACCTGAGCGCACCTGTTGTCTATGTGATAGACGT |
| | | | GCCACATGCTTTTCCACTGCTTCAGACACTTATGCCTG |
| | | | TTGGCATCATTCTATTGGATTTGATTACGTCTATAATC |
| | | | CGTTTATGATTGATGTTCAACAATGGGGTTTTACAGGT |
| | | | AACCTACAAAGCAACCATGATCTGTATTGTCAAGTCC |
| | | | ATGGTAATGCACATGTAGCTAGTTGTGATGCAATCAT |
| | | | GACTAGGTGTCTAGCTGTCCACGAGTGCTTTGTTAAGC |
| | | | GTGTTGACTGGACTATTGAATATCCTATAATTGGTGAT |
| | | | GAACTGAAGATTAATGCGGCTTGTAGAAAGGTTCAAC |
| | | | ACATGGTTGTTAAAGCTGCATTATTAGCAGACAAATTC |
| | | | CCAGTTCTTCACGACATTGGTAACCCTAAAGCTATTAA |
| | | | GTGTGTACCTCAAGCTGATGTAGAATGGAAGTTCTAT |
| | | | GATGCACAGCCTTGTAGTGACAAAGCTTATAAAATAG |
| | | | AAGAATTATTCTATTCTTATGCCACACATTCTGACAAA |
| | | | TTCACAGATGGTGTATGCCTATTTTGGAATTGCAATGT |
| | | | CGATAGATATCCTGCTAATTCCATTGTTTGTAGATTTG |
| | | | ACACTAGAGTGCTATCTAACCTTAACTTGCCTGGTTGT |
| | | | GATGGTGGCAGTTTGTATGTAAATAAACATGCATTCC |
| | | | ACACACCAGCTTTTGATAAAAGTGCTTTTGTTAATTTA |
| | | | AAACAATTACCATTTTTCTATTACTCTGACAGTCCATG |
| | | | TGAGTCTCATGGAAAACAAGTAGTGTCAGATATAGAT |
| | | | TATGTACCACTAAAGTCTGCTACGTGTATAACACGTTG |
| | | | CAATTTAGGTGGTGCTGTCTGTAGACATCATGCTAATG |
| | | | AGTACAGATTGTATCTCGATGCTTATAACATGATGATC |
| | | | TCAGCTGGCTTTAGCTTGTGGGTTTACAAACAATTTGA |
| | | | TACTTATAACCTCTGGAACACTTTTACAAGACTTCAGA |
| | | | GTTTAGAAAATGTGGCTTTTAATGTTGTAAATAAGGG |
| | | | ACACTTTGATGGACAACAGGGTGAAGTACCAGTTTCT |
| | | | ATCATTAATAACACTGTTTACACAAAAGTTGATGGTGT |
| | | | TGATGTAGAATTGTTTGAAAATAAAACAACATTACCT |
| | | | GTTAATGTAGCATTTGAGCTTTGGGCTAAGCGCAACAT |
| | | | TAAACCAGTACCAGAGGTGAAAATACTCAATAATTTG |
| | | | GGTGTGGACATTGCTGCTAATACTGTGATCTGGGACTA |
| | | | CAAAAGAGATGCTCCAGCACATATATCTACTATTGGT |
| | | | GTTTGTTCTATGACTGACATAGCCAAGAAACCAACTG |
| | | | AAACGATTTGTGCACCACTCACTGTCTTTTTTGATGGT |
| | | | AGAGTTGATGGTCAAGTAGACTTATTTAGAAATGCCC |
| | | | GTAATGGTGTTCTTATTACAGAAGGTAGTGTTAAAGGT |
| | | | TTACAACCATCTGTAGGTCCCAAACAAGCTAGTCTTAA |
| | | | TGGAGTCACATTAATTGGAGAAGCCGTAAAAACACAG |
| | | | TTCAATTATTATAAGAAAGTTGATGGTGTTGTCCAACA |
| | | | ATTACCTGAAACTTACTTTACTCAGAGTAGAAATTTAC |
| | | | AAGAATTTAAACCCAGGAGTCAAATGGAAATTGATTT |
| | | | CTTAGAATTAGCTATGGATGAATTCATTGAACGGTATA |
| | | | AATTAGAAGGCTATGCCTTCGAACATATCGTTTATGGA |
| | | | GATTTTAGTCATAGTCAGTTAGGTGGTTTACATCTACT |
| | | | GATTGGACTAGCTAAACGTTTTAAGGAATCACCTTTTG |
| | | | AATTAGAAGATTTTATTCCTATGGACAGTACAGTTAAA |
| | | | AACTATTTCATAACAGATGCGCAAACAGGTTCATCTA |
| | | | AGTGTGTGTGTTCTGTTATTGATTTATTACTTGATGATT |
| | | | TTGTTGAAATAATAAAATCCCAAGATTTATCTGTAGTT |
| | | | TCTAAGGTTGTCAAAGTGACTATTGACTATACAGAAA |
| | | | TTTCATTTATGCTTTGGTGTAAAGATGGCCATGTAGAA |
| | | | ACATTTTACCCAAAATTACAATCTAGTCAAGCGTGGC |
| | | | AACCGGGTGTTGCTATGCCTAATCTTTACAAAATGCAA |
| | | | AGAATGCTATTAGAAAAGTGTGACCTTCAAAATTATG |
| | | | GTGATAGTGCAACATTACCTAAAGGCATAATGATGAA |
| | | | TGTCGCAAAATATACTCAACTGTGTCAATATTTAAACA |
| | | | CATTAACATTAGCTGTACCCTATAATATGAGAGTTATA |
| | | | CATTTTGGTGCTGGTTCTGATAAAGGAGTTGCACCAGG |
| | | | TACAGCTGTTTTAAGACAGTGGTTGCCTACGGGTACGC |
| | | | TGCTTGTCGATTCAGATCTTAATGACTTTGTCTCTGAT |
| | | | GCAGATTCAACTTTGATTGGTGATTGTGCAACTGTACA |
| | | | TACAGCTAATAAATGGGATCTCATTATTAGTGATATGT |
| | | | ACGACCCTAAGACTAAAAATGTTACAAAAGAAAATGA |
| | | | CTCTAAAGAGGGTTTTTTCACTTACATTTGTGGGTTTA |
| | | | TACAACAAAAGCTAGCTCTTGGAGGTTCCGTGGCTAT |
| | | | AAAGATAACAGAACATTCTTGGAATGCTGATCTTTAT |
| | | | AAGCTCATGGGACACTTCGCATGGTGGACAGCCTTTG |
| | | | TTACTAATGTGAATGCGTCATCATCTGAAGCATTTTTA |
| | | | ATTGGATGTAATTATCTTGGCAAACCACGCGAACAAA |
| | | | TAGATGGTTATGTCATGCATGCAAATTACATATTTTGG |
| | | | AGGAATACAAATCCAATTCAGTTGTCTTCCTATTCTTT |
| | | | ATTTGACATGAGTAAATTTCCCCTTAAATTAAGGGGTA |
| | | | CTGCTGTTATGTCTTTAAAAGAAGGTCAAATCAATGAT |
| | | | ATGATTTTATCTCTTCTTAGTAAAGGTAGACTTATAAT |
| | | | TAGAGAAAACAACAGAGTTGTTATTTCTAGTGATGTTC |
| | | | TTGTTAACAACTA |
| S | 21563 | 25384 | ATGTTTGTTTTTCTTGTTTTATTGCCACTAGTCTCTAGT |
| (SEQ ID | | | CAGTGTGTTAATCTTACAACCAGAACTCAATTACCCCC |
| NO: 4) | | | TGCATACACTAATTCTTTCACACGTGGTGTTTATTACC |
| | | | CTGACAAAGTTTTCAGATCCTCAGTTTTACATTCAACT |
| | | | CAGGACTTGTTCTTACCTTTCTTTTCCAATGTTACTTGG |
| | | | TTCCATGCTATACATGTCTCTGGGACCAATGGTACTAA |
| | | | GAGGTTTGATAACCCTGTCCTACCATTTAATGATGGTG |
| | | | TTTATTTTGCTTCCACTGAGAAGTCTAACATAATAAGA |
| | | | GGCTGGATTTTTGGTACTACTTTAGATTCGAAGACCCA |
| | | | GTCCCTACTTATTGTTAATAACGCTACTAATGTTGTTA |
| | | | TTAAAGTCTGTGAATTTCAATTTTGTAATGATCCATTT |
| | | | TTGGGTGTTTATTACCACAAAAACAACAAAAGTTGGA |
| | | | TGGAAAGTGAGTTCAGAGTTTATTCTAGTGCGAATAA |
| | | | TTGCACTTTTGAATATGTCTCTCAGCCTTTTCTTATGGA |
| | | | CCTTGAAGGAAAACAGGGTAATTTCAAAAATCTTAGG |
| | | | GAATTTGTGTTTAAGAATATTGATGGTTATTTTAAAAT |
| | | | ATATTCTAAGCACACGCCTATTAATTTAGTGCGTGATC |
| | | | TCCCTCAGGGTTTTTCGGCTTTAGAACCATTGGTAGAT |
| | | | TTGCCAATAGGTATTAACATCACTAGGTTTCAAACTTT |
| | | | ACTTGCTTTACATAGAAGTTATTTGACTCCTGGTGATT |
| | | | CTTCTTCAGGTTGGACAGCTGGTGCTGCAGCTTATTAT |
| | | | GTGGGTTATCTTCAACCTAGGACTTTTCTATTAAAATA |
| | | | TAATGAAAATGGAACCATTACAGATGCTGTAGACTGT |
| | | | GCACTTGACCCTCTCTCAGAAACAAAGTGTACGTTGA |
| | | | AATCCTTCACTGTAGAAAAAGGAATCTATCAAACTTCT |
| | | | AACTTTAGAGTCCAACCAACAGAATCTATTGTTAGATT |
| | | | TCCTAATATTACAAACTTGTGCCCTTTTGGTGAAGTTT |
| | | | TTAACGCCACCAGATTTGCATCTGTTTATGCTTGGAAC |
| | | | AGGAAGAGAATCAGCAACTGTGTTGCTGATTATTCTG |
| | | | TCCTATATAATTCCGCATCATTTTCCACTTTTAAGTGTT |
| | | | ATGGAGTGTCTCCTACTAAATTAAATGATCTCTGCTTT |
| | | | ACTAATGTCTATGCAGATTCATTTGTAATTAGAGGTGA |
| | | | TGAAGTCAGACAAATCGCTCCAGGGCAAACTGGAAAG |
| | | | ATTGCTGATTATAATTATAAATTACCAGATGATTTTAC |
| | | | AGGCTGCGTTATAGCTTGGAATTCTAACAATCTTGATT |
| | | | CTAAGGTTGGTGGTAATTATAATTACCTGTATAGATTG |
| | | | TTTAGGAAGTCTAATCTCAAACCTTTTGAGAGAGATAT |
| | | | TTCAACTGAAATCTATCAGGCCGGTAGCACACCTTGTA |
| | | | ATGGTGTTGAAGGTTTTAATTGTTACTTTCCTTTACAA |
| | | | TCATATGGTTTCCAACCCACTAATGGTGTTGGTTACCA |
| | | | ACCATACAGAGTAGTAGTACTTTCTTTTGAACTTCTAC |
| | | | ATGCACCAGCAACTGTTTGTGGACCTAAAAAGTCTAC |
| | | | TAATTTGGTTAAAAACAAATGTGTCAATTTCAACTTCA |
| | | | ATGGTTTAACAGGCACAGGTGTTCTTACTGAGTCTAAC |
| | | | AAAAAGTTTCTGCCTTTCCAACAATTTGGCAGAGACAT |
| | | | TGCTGACACTACTGATGCTGTCCGTGATCCACAGACAC |
| | | | TTGAGATTCTTGACATTACACCATGTTCTTTTGGTGGT |
| | | | GTCAGTGTTATAACACCAGGAACAAATACTTCTAACC |
| | | | AGGTTGCTGTTCTTTATCAGGATGTTAACTGCACAGAA |
| | | | GTCCCTGTTGCTATTCATGCAGATCAACTTACTCCTAC |
| | | | TTGGCGTGTTTATTCTACAGGTTCTAATGTTTTTCAAA |
| | | | CACGTGCAGGCTGTTTAATAGGGGCTGAACATGTCAA |
| | | | CAACTCATATGAGTGTGACATACCCATTGGTGCAGGT |
| | | | ATATGCGCTAGTTATCAGACTCAGACTAATTCTCCTCG |
| | | | GCGGGCACGTAGTGTAGCTAGTCAATCCATCATTGCCT |
| | | | ACACTATGTCACTTGGTGCAGAAAATTCAGTTGCTTAC |
| | | | TCTAATAACTCTATTGCCATACCCACAAATTTTACTAT |
| | | | TAGTGTTACCACAGAAATTCTACCAGTGTCTATGACCA |
| | | | AGACATCAGTAGATTGTACAATGTACATTTGTGGTGAT |
| | | | TCAACTGAATGCAGCAATCTTTTGTTGCAATATGGCAG |
| | | | TTTTTGTACACAATTAAACCGTGCTTTAACTGGAATAG |
| | | | CTGTTGAACAAGACAAAAACACCCAAGAAGTTTTTGC |
| | | | ACAAGTCAAACAAATTTACAAAACACCACCAATTAAA |
| | | | GATTTTGGTGGTTTTAATTTTTCACAAATATTACCAGA |
| | | | TCCATCAAAACCAAGCAAGAGGTCATTTATTGAAGAT |
| | | | CTACTTTTCAACAAAGTGACACTTGCAGATGCTGGCTT |
| | | | CATCAAACAATATGGTGATTGCCTTGGTGATATTGCTG |
| | | | CTAGAGACCTCATTTGTGCACAAAAGTTTAACGGCCTT |
| | | | ACTGTTTTGCCACCTTTGCTCACAGATGAAATGATTGC |
| | | | TCAATACACTTCTGCACTGTTAGCGGGTACAATCACTT |
| | | | CTGGTTGGACCTTTGGTGCAGGTGCTGCATTACAAATA |
| | | | CCATTTGCTATGCAAATGGCTTATAGGTTTAATGGTAT |
| | | | TGGAGTTACACAGAATGTTCTCTATGAGAACCAAAAA |
| | | | TTGATTGCCAACCAATTTAATAGTGCTATTGGCAAAAT |
| | | | TCAAGACTCACTTTCTTCCACAGCAAGTGCACTTGGAA |
| | | | AACTTCAAGATGTGGTCAACCAAAATGCACAAGCTTT |
| | | | AAACACGCTTGTTAAACAACTTAGCTCCAATTTTGGTG |
| | | | CAATTTCAAGTGTTTTAAATGATATCCTTTCACGTCTT |
| | | | GACAAAGTTGAGGCTGAAGTGCAAATTGATAGGTTGA |
| | | | TCACAGGCAGACTTCAAAGTTTGCAGACATATGTGAC |
| | | | TCAACAATTAATTAGAGCTGCAGAAATCAGAGCTTCT |
| | | | GCTAATCTTGCTGCTACTAAAATGTCAGAGTGTGTACT |
| | | | TGGACAATCAAAAAGAGTTGATTTTTGTGGAAAGGGC |
| | | | TATCATCTTATGTCCTTCCCTCAGTCAGCACCTCATGG |
| | | | TGTAGTCTTCTTGCATGTGACTTATGTCCCTGCACAAG |
| | | | AAAAGAACTTCACAACTGCTCCTGCCATTTGTCATGAT |
| | | | GGAAAAGCACACTTTCCTCGTGAAGGTGTCTTTGTTTC |
| | | | AAATGGCACACACTGGTTTGTAACACAAAGGAATTTT |
| | | | TATGAACCACAAATCATTACTACAGACAACACATTTG |
| | | | TGTCTGGTAACTGTGATGTTGTAATAGGAATTGTCAAC |
| | | | AACACAGTTTATGATCCTTTGCAACCTGAATTAGACTC |
| | | | ATTCAAGGAGGAGTTAGATAAATATTTTAAGAATCAT |
| | | | ACATCACCAGATGTTGATTTAGGTGACATCTCTGGCAT |
| | | | TAATGCTTCAGTTGTAAACATTCAAAAAGAAATTGAC |
| | | | CGCCTCAATGAGGTTGCCAAGAATTTAAATGAATCTCT |
| | | | CATCGATCTCCAAGAACTTGGAAAGTATGAGCAGTAT |
| | | | ATAAAATGGCCATGGTACATTTGGCTAGGTTTTATAGC |
| | | | TGGCTTGATTGCCATAGTAATGGTGACAATTATGCTTT |
| | | | GCTGTATGACCAGTTGCTGTAGTTGTCTCAAGGGCTGT |
| | | | TGTTCTTGTGGATCCTGCTGCAAATTTGATGAAGACGA |
| | | | CTCTGAGCCAGTGCTCAAAGGAGTCAAATTACATTAC |
| | | | ACATA |
| 3a | 25393 | 26220 | ATGGATTTGTTTATGAGAATCTTCACAATTGGAACTGT |
| (SEQ ID | | | AACTTTGAAGCAAGGTGAAATCAAGGATGCTACTCCT |
| NO: 5) | | | TCAGATTTTGTTCGCGCTACTGCAACGATACCGATACA |
| | | | AGCCTCACTCCCTTTCGGATGGCTTATTGTTGGCGTTG |
| | | | CACTTCTTGCTGTTTTTCAGAGCGCTTCCAAAATCATA |
| | | | ACCCTCAAAAAGAGATGGCAACTAGCACTCTCCAAGG |
| | | | GTGTTCACTTTGTTTGCAACTTGCTGTTGTTGTTTGTAA |
| | | | CAGTTTACTCACACCTTTTGCTCGTTGCTGCTGGCCTT |
| | | | GAAGCCCCTTTTCTCTATCTTTATGCTTTAGTCTACTTC |
| | | | TTGCAGAGTATAAACTTTGTAAGAATAATAATGAGGC |
| | | | TTTGGCTTTGCTGGAAATGCCGTTCCAAAAACCCATTA |
| | | | CTTTATGATGCCAACTATTTTCTTTGCTGGCATACTAA |
| | | | TTGTTACGACTATTGTATACCTTACAATAGTGTAACTT |
| | | | CTTCAATTGTCATTACTTCAGGTGATGGCACAACAAGT |
| | | | CCTATTTCTGAACATGACTACCAGATTGGTGGTTATAC |
| | | | TGAAAAATGGGAATCTGGAGTAAAAGACTGTGTTGTA |
| | | | TTACACAGTTACTTCACTTCAGACTATTACCAGCTGTA |
| | | | CTCAACTCAATTGAGTACAGACACTGGTGTTGAACAT |
| | | | GTTACCTTCTTCATCTACAATAAAATTGTTGATGAGCC |
| | | | TGAAGAACATGTCCAAATTCACACAATCGACGGTTCA |
| | | | TCCGGAGTTGTTAATCCAGTAATGGAACCAATTTATGA |
| | | | TGAACCGACGACGACTACTAGCGTGCCTTTGTA |
| E | 26245 | 26472 | ATGTACTCATTCGTTTCGGAAGAGACAGGTACGTTAAT |
| (SEQ ID | | | AGTTAATAGCGTACTTCTTTTTCTTGCTTTCGTGGTATT |
| NO: 6) | | | CTTGCTAGTTACACTAGCCATCCTTACTGCGCTTCGAT |
| | | | TGTGTGCGTACTGCTGCAATATTGTTAACGTGAGTCTT |
| | | | GTAAAACCTTCTTTTTACGTTTACTCTCGTGTTAAAAA |
| | | | TCTGAATTCTTCTAGAGTTCCTGATCTTCTGGTCTA |
| M | 26523 | 27191 | ATGGCAGATTCCAACGGTACTATTACCGTTGAAGAGC |
| (SEQ ID | | | TTAAAAAGCTCCTTGAACAATGGAACCTAGTAATAGG |
| NO: 7) | | | TTTCCTATTCCTTACATGGATTTGTCTTCTACAATTTGC |
| | | | CTATGCCAACAGGAATAGGTTTTTGTATATAATTAAGT |
| | | | TAATTTTCCTCTGGCTGTTATGGCCAGTAACTTTAGCT |
| | | | TGTTTTGTGCTTGCTGCTGTTTACAGAATAAATTGGAT |
| | | | CACCGGTGGAATTGCTATCGCAATGGCTTGTCTTGTAG |
| | | | GCTTGATGTGGCTCAGCTACTTCATTGCTTCTTTCAGA |
| | | | CTGTTTGCGCGTACGCGTTCCATGTGGTCATTCAATCC |
| | | | AGAAACTAACATTCTTCTCAACGTGCCACTCCATGGCA |
| | | | CTATTCTGACCAGACCGCTTCTAGAAAGTGAACTCGTA |
| | | | ATCGGAGCTGTGATCCTTCGTGGACATCTTCGTATTGC |
| | | | TGGACACCATCTAGGACGCTGTGACATCAAGGACCTG |
| | | | CCTAAAGAAATCACTGTTGCTACATCACGAACGCTTTC |
| | | | TTATTACAAATTGGGAGCTTCGCAGCGTGTAGCAGGT |
| | | | GACTCAGGTTTTGCTGCATACAGTCGCTACAGGATTGG |
| | | | CAACTATAAATTAAACACAGACCATTCCAGTAGCAGT |
| | | | GACAATATTGCTTTGCTTGTACAGTA |
| 7a | 27394 | 27759 | ATGAAAATTATTCTTTTCTTGGCACTGATAACACTCGC |
| (SEQ ID | | | TACTTGTGAGCTTTATCACTACCAAGAGTGTGTTAGAG |
| NO: 8) | | | GTACAACAGTACTTTTAAAAGAACCTTGCTCTTCTGGA |
| | | | ACATACGAGGGCAATTCACCATTTCATCCTCTAGCTGA |
| | | | TAACAAATTTGCACTGACTTGCTTTAGCACTCAATTTG |
| | | | CTTTTGCTTGTCCTGACGGCGTAAAACACGTCTATCAG |
| | | | TTACGTGCCAGATCAGTTTCACCTAAACTGTTCATCAG |
| | | | ACAAGAGGAAGTTCAAGAACTTTACTCTCCAATTTTTC |
| | | | TTATTGTTGCGGCAATAGTGTTTATAACACTTTGCTTC |
| | | | ACACTCAAAAGAAAGACAGAATG |
| 8a | 27894 | 28259 | ATGAAATTTCTTGTTTTCTTAGGAATCATCACAACTGT |
| (SEQ ID | | | AGCTGCATTTCACCAAGAATGTAGTTTACAGTCATGTA |
| NO: 9) | | | CTCAACATCAACCATATGTAGTTGATGACCCGTGTCCT |
| | | | ATTCACTTCTATTCTAAATGGTATATTAGAGTAGGAGC |
| | | | TAGAAAATCAGCACCTTTAATTGAATTGTGCGTGGAT |
| | | | GAGGCTGGTTCTAAATCACCCATTCAGTACATCGATAT |
| | | | CGGTAATTATACAGTTTCCTGTTTACCTTTTACAATTA |
| | | | ATTGCCAGGAACCTAAATTGGGTAGTCTTGTAGTGCGT |
| | | | TGTTCGTTCTATGAAGACTTTTTAGAGTATCATGACGT |
| | | | TCGTGTTGTTTTAGATTTCATCTA |
| N | 28274 | 29533 | ATGTCTGATAATGGACCCCAAAATCAGCGAAATGCAC |
| (SEQ ID | | | CCCGCATTACGTTTGGTGGACCCTCAGATTCAACTGGC |
| NO: 10) | | | AGTAACCAGAATGGAGAACGCAGTGGGGCGCGATCA |
| | | | AAACAACGTCGGCCCCAAGGTTTACCCAATAATACTG |
| | | | CGTCTTGGTTCACCGCTCTCACTCAACATGGCAAGGAA |
| | | | GACCTTAAATTCCCTCGAGGACAAGGCGTTCCAATTA |
| | | | ACACCAATAGCAGTCCAGATGACCAAATTGGCTACTA |
| | | | CCGAAGAGCTACCAGACGAATTCGTGGTGGTGACGGT |
| | | | AAAATGAAAGATCTCAGTCCAAGATGGTATTTCTACT |
| | | | ACCTAGGAACTGGGCCAGAAGCTGGACTTCCCTATGG |
| | | | TGCTAACAAAGACGGCATCATATGGGTTGCAACTGAG |
| | | | GGAGCCTTGAATACACCAAAAGATCACATTGGCACCC |
| | | | GCAATCCTGCTAACAATGCTGCAATCGTGCTACAACTT |
| | | | CCTCAAGGAACAACATTGCCAAAAGGCTTCTACGCAG |
| | | | AAGGGAGCAGAGGCGGCAGTCAAGCCTCTTCTCGTTC |
| | | | CTCATCACGTAGTCGCAACAGTTCAAGAAATTCAACT |
| | | | CCAGGCAGCAGTAGGGGAACTTCTCCTGCTAGAATGG |
| | | | CTGGCAATGGCGGTGATGCTGCTCTTGCTTTGCTGCTG |
| | | | CTTGACAGATTGAACCAGCTTGAGAGCAAAATGTCTG |
| | | | GTAAAGGCCAACAACAACAAGGCCAAACTGTCACTAA |
| | | | GAAATCTGCTGCTGAGGCTTCTAAGAAGCCTCGGCAA |
| | | | AAACGTACTGCCACTAAAGCATACAATGTAACACAAG |
| | | | CTTTCGGCAGACGTGGTCCAGAACAAACCCAAGGAAA |
| | | | TTTTGGGGACCAGGAACTAATCAGACAAGGAACTGAT |
| | | | TACAAACATTGGCCGCAAATTGCACAATTTGCCCCCA |
| | | | GCGCTTCAGCGTTCTTCGGAATGTCGCGCATTGGCATG |
| | | | GAAGTCACACCTTCGGGAACGTGGTTGACCTACACAG |
| | | | GTGCCATCAAATTGGATGACAAAGATCCAAATTTCAA |
| | | | AGATCAAGTCATTTTGCTGAATAAGCATATTGACGCAT |
| | | | ACAAAACATTCCCACCAACAGAGCCTAAAAAGGACAA |
| | | | AAAGAAGAAGGCTGATGAAACTCAAGCCTTACCGCAG |
| | | | AGACAGAAGAAACAGCAAACTGTGACTCTTCTTCCTG |
| | | | CTGCAGATTTGGATGATTTCTCCAAACAATTGCAACAA |
| | | | TCCATGAGCAGTGCTGACTCAACTCAGGCCTA |

[0588] The invention covers a combination of bioinformatic approaches to identify regions of conservation (based on 718 patient isolates) in combination with features essential for RISC entry and tolerance of chemical modifications. The method uses a scoring scheme to identify siRNAs that target regions of related viral genomes with low mutation rates. Since viral targets are known to mutate frequently, it was imperative to select siRNAs targeting regions that are predicted to remain constant. We identified these regions as those with high homology to the six most closely-related coronavirus genomes (Middle East respiratory syndrome-related coronavirus (MERS-CoV), Human coronavirus 229E, Human coronavirus NL63 (HCoV-NL63), Human coronavirus HKU1 (HCoV-HKU1), Human coronavirus OC43 (HCoV-OC43), and SARS coronavirus) indicating low rates of mutation within these regions.

[0589] The percent homology to the related coronavirus genomes was determined for every position for each of the SARS-CoV-2 target genes. siRNA sequence designs were then scored by the number of positions within the sequence having a percentage homology greater than 70% within position 2-8 and greater than 50% for at least 10 bases within the remaining positions of the 16-nucleotide targeting region of the 20-nucleotide siRNA. The design algorithm identified a 20-nucleotide siRNA sequences and scored them by their predicted efficiency to knockdown the target transcript. The 20-nucleotide siRNA target regions are summarized in Table 6A and Table 7. Top scoring siRNAs had the highest potential to knockdown the target transcript and targeted regions with the highest homology to other closely related coronaviruses (Middle East respiratory syndrome-related coronavirus (MERS-CoV), Human coronavirus 229E, Human coronavirus NL63 (HCoV-NL63), Human coronavirus HKU1 (HCoV-HKU1), Human coronavirus OC43 (HCoV-OC43), and SARS coronavirus) are summarized in Table 8 and were selected for synthesis. ASOs targeting SARS-CoV-2 genes are summarized in Table 9.

TABLE 6A
SARS-CoV2 Screened-20 nucleotide target sequences and 45 nucleotide
target gene regions

| | | SEQ | | SEQ |
|---|---|---|---|---|
| | | ID | | ID |
| Sequence ID | 20 nt Sequence | NO: | 45 nt Gene Region | NO: |
| orf1ab_14080 | GGUAACUGG | 11 | AATCAAGATCTCAATGGTAACTGGTAT | 119 |
| | UAUGAUUUC | | GATTTCGGTGATTTCATA | |
| | GG | | | |
| orf1ab_14361 | UCUGCAUUG | 12 | GGATGACAGATGCATTCTGCATTGTGC | 120 |
| | UGCAAACUU | | AAACTTTAATGTTTTATT | |
| | UA | | | |
| orf1ab_14830 | UGUGAUAUC | 13 | AATCTACCAACAATGTGTGATATCAGA | 121 |
| | AGACAACUA | | CAACTACTATTTGTAGTT | |
| | CU | | | |
| orf1ab_15376 | UGUAGCUUG | 14 | AAACATACAACGTGTTGTAGCTTGTCA | 122 |
| | UCACACCGU | | CACCGTTTCTATAGATTA | |
| | UU | | | |
| orf1ab_15786 | UAAGUCAGU | 15 | TAGCATAAAGAACTTTAAGTCAGTTCT | 123 |
| | UCUUUAUUA | | TTATTATCAAAACAATGT | |
| | UC | | | |
| orf1ab_17107 | UUUGCUAUU | 16 | ACTGGTAAGAGTCATTTTGCTATTGGC | 124 |
| | GGCCUAGCU | | CTAGCTCTCTACTACCCT | |
| | CU | | | |
| orf1ab_17370 | GGCCACAAA | 17 | TGATGAAATTTCAATGGCCACAAATTA | 125 |
| | UUAUGAUU | | TGATTTGAGTGTTGTCAA | |
| | UGA | | | |
| orf1ab_18025 | GUGGCAACU | 18 | ATTCCACGTAGGAATGTGGCAACTTTA | 126 |
| | UUACAAGCU | | CAAGCTGAAAATGTAACA | |
| | GA | | | |
| orf1ab_18571 | UCUGACAGA | 19 | ACACTTAAAAATCTCTCTGACAGAGTC | 127 |
| | GUCGUAUUU | | GTATTTGTCTTATGGGCA | |
| | GU | | | |
| orf1ab_20497 | UCUGUUAUU | 20 | TCTAAGTGTGTGTGTTCTGTTATTGATT | 128 |
| | GAUUUAUU | | TATTACTTGATGATTTT | |
| | ACU | | | |
| orf1ab_20892 | UGCACCAGG | 21 | TTCTGATAAAGGAGTTGCACCAGGTAC | 129 |
| | UACAGCUGU | | AGCTGTTTTAAGACAGTG | |
| | UU | | | |
| orf1ab_21391 | UUUGACAUG | 22 | TCTTCCTATTCTTTATTTGACATGAGTA | 130 |
| | AGUAAAUU | | AATTTCCCCTTAAATTA | |
| | UCC | | | |
| orf1a_416 | UGUGGCUUA | 23 | CTTAAAGATGGCACTTGTGGCTTAGTA | 131 |
| | GUAGAAGU | | GAAGTTGAAAAAGGCGTT | |
| | UGA | | | |
| orf1a_2290 | UCAGACAUU | 24 | AATTAAGGAGAGTGTTCAGACATTCTT | 132 |
| | CUUUAAGCU | | TAAGCTTGTAAATAAATT | |
| | UG | | | |
| orf1a_6059 | UGUGAUAA | 25 | AATTTTAAGTTTGTATGTGATAATATC | 133 |
| | UAUCAAAUU | | AAATTTGCTGATGATTTA | |
| | UGC | | | |
| orf1a_6322 | UGAAACAUC | 26 | GAGCACAAAACCAGTTGAAACATCAA | 134 |
| | AAAUUCGUU | | ATTCGTTTGATGTACTGAA | |
| | UG | | | |
| orf1a_6499 | ACCAGCAAA | 27 | AGACATTATACTTAAACCAGCAAATAA | 135 |
| | UAAUAGUU | | TAGTTTAAAAATTACAGA | |
| | UAA | | | |
| orf1a_7643 | GCUGGUAGU | 28 | TGTGATACATTCTGTGCTGGTAGTACA | 136 |
| | ACAUUUAUU | | TTTATTAGTGATGAAGTT | |
| | AG | | | |
| orf1a_8200 | UGUAGAAAC | 29 | GTTTGTTGATTCAGATGTAGAAACTAA | 137 |
| | UAAAGAUG | | AGATGTTGTTGAATGTCT | |
| | UUG | | | |
| orf1a_8201 | GUAGAAACU | 30 | TTTGTTGATTCAGATGTAGAAACTAAA | 138 |
| | AAAGAUGU | | GATGTTGTTGAATGTCTT | |
| | UGU | | | |
| orf1a_8744 | UUUGCUAAC | 31 | TCTACAGATACTTGTTTTGCTAACAAA | 139 |
| | AAACAUGCU | | CATGCTGATTTTGACACA | |
| | GA | | | |
| orf1a_9679 | CUGGAUAAC | 32 | ACCTTTAGTACCTTTCTGGATAACAAT | 140 |
| | AAUUGCUUA | | TGCTTATATCATTTGTAT | |
| | UA | | | |
| orf1a_11594 | CAGUGUAUA | 33 | ACTGGTAATACACTTCAGTGTATAATG | 141 |
| | AUGCUAGUU | | CTAGTTTATTGTTTCTTA | |
| | UA | | | |
| orf1a_12932 | CCUAAAGUG | 34 | GACACACCTAAAGGTCCTAAAGTGAA | 142 |
| | AAGUAUUU | | GTATTTATACTTTATTAAA | |
| | AUA | | | |
| S_21944 | AUUAAAGUC | 35 | GCTACTAATGTTGTTATTAAAGTCTGT | 143 |
| | UGUGAAUU | | GAATTTCAATTTTGTAAT | |
| | UCA | | | |
| S_22223 | UCGGCUUUA | 36 | CTCCCTCAGGGTTTTTCGGCTTTAGAA | 144 |
| | GAACCAUUG | | CCATTGGTAGATTTGCCA | |
| | GU | | | |
| S_22550 | CCUAAUAUU | 37 | TCTATTGTTAGATTTCCTAATATTACAA | 145 |
| | ACAAACUUG | | ACTTGTGCCCTTTTGGT | |
| | UG | | | |
| S_22820 | GAUUAUAA | 38 | ACTGGAAAGATTGCTGATTATAATTAT | 146 |
| | UUAUAAAU | | AAATTACCAGATGATTTT | |
| | UACC | | | |
| S_22898 | GGUGGUAA | 39 | CTTGATTCTAAGGTTGGTGGTAATTAT | 147 |
| | UUAUAAUU | | AATTACCTGTATAGATTG | |
| | ACCU | | | |
| S_23174 | UGUGUCAAU | 40 | TTGGTTAAAAACAAATGTGTCAATTTC | 148 |
| | UUCAACUUC | | AACTTCAATGGTTTAACA | |
| | AA | | | |
| S_23239 | UCUGCCUUU | 41 | GTCTAACAAAAAGTTTCTGCCTTTCCA | 149 |
| | CCAACAAUU | | ACAATTTGGCAGAGACAT | |
| | UG | | | |
| S_23240 | CUGCCUUUC | 42 | TCTAACAAAAAGTTTCTGCCTTTCCAA | 150 |
| | CAACAAUUU | | CAATTTGGCAGAGACATT | |
| | GG | | | |
| S_23774 | UGUACAAUG | 43 | AAGACATCAGTAGATTGTACAATGTAC | 151 |
| | UACAUUUGU | | ATTTGTGGTGATTCAACT | |
| | GG | | | |
| S_24056 | GGCUUCAUC | 44 | ACACTTGCAGATGCTGGCTTCATCAAA | 152 |
| | AAACAAUAU | | CAATATGGTGATTGCCTT | |
| | GG | | | |
| S_24289 | UGGAGUUAC | 45 | TAGGTTTAATGGTATTGGAGTTACACA | 153 |
| | ACAGAAUGU | | GAATGTTCTCTATGAGAA | |
| | UC | | | |
| S_25375 | UUACACAUA | 46 | AGGAGTCAAATTACATTACACATAAAC | 154 |
| | AACGAACUU | | GAACTTATGGATTTGTTT | |
| | AU | | | |
| 3a_25413 | CUUCACAAU | 47 | TTTGTTTATGAGAATCTTCACAATTGG | 155 |
| | UGGAACUGU | | AACTGTAACTTTGAAGCA | |
| | AA | | | |
| 3a_25630 | GUUUGCAAC | 48 | AAGGGTGTTCACTTTGTTTGCAACTTG | 156 |
| | UUGCUGUUG | | CTGTTGTTGTTTGTAACA | |
| | UU | | | |
| 3a_25717 | UAUGCUUUA | 49 | CCTTTTCTCTATCTTTATGCTTTAGTCT | 157 |
| | GUCUACUUC | | ACTTCTTGCAGAGTATA | |
| | UU | | | |
| 3a_25734 | CUUGCAGAG | 50 | TGCTTTAGTCTACTTCTTGCAGAGTAT | 158 |
| | UAUAAACUU | | AAACTTTGTAAGAATAAT | |
| | UG | | | |
| 3a_25736 | UGCAGAGUA | 51 | CTTTAGTCTACTTCTTGCAGAGTATAA | 159 |
| | UAAACUUUG | | ACTTTGTAAGAATAATAA | |
| | UA | | | |
| 3a_25745 | UAAACUUUG | 52 | ACTTCTTGCAGAGTATAAACTTTGTAA | 160 |
| | UAAGAAUA | | GAATAATAATGAGGCTTT | |
| | AUA | | | |
| 3a_25868 | CUUACAAUA | 53 | ACGACTATTGTATACCTTACAATAGTG | 161 |
| | GUGUAACUU | | TAACTTCTTCAATTGTCA | |
| | CU | | | |
| 3a_25870 | UACAAUAGU | 54 | GACTATTGTATACCTTACAATAGTGTA | 162 |
| | GUAACUUCU | | ACTTCTTCAATTGTCATT | |
| | UC | | | |
| 3a_25914 | CACAACAAG | 55 | TACTTCAGGTGATGGCACAACAAGTCC | 163 |
| | UCCUAUUUC | | TATTTCTGAACATGACTA | |
| | UG | | | |
| 3a_25992 | UGUUGUAU | 56 | TGGAGTAAAAGACTGTGTTGTATTACA | 164 |
| | UACACAGUU | | CAGTTACTTCACTTCAGA | |
| | ACU | | | |
| 3a_26018 | CAGACUAUU | 57 | ACAGTTACTTCACTTCAGACTATTACC | 165 |
| | ACCAGCUGU | | AGCTGTACTCAACTCAAT | |
| | AC | | | |
| 3a_26066 | UUGAACAUG | 58 | GTACAGACACTGGTGTTGAACATGTTA | 166 |
| | UUACCUUCU | | CCTTCTTCATCTACAATA | |
| | UC | | | |
| E_26258 | UUUCGGAAG | 59 | TTATGTACTCATTCGTTTCGGAAGAGA | 167 |
| | AGACAGGUA | | CAGGTACGTTAATAGTTA | |
| | CG | | | |
| E_26261 | CGGAAGAGA | 60 | TGTACTCATTCGTTTCGGAAGAGACAG | 168 |
| | CAGGUACGU | | GTACGTTAATAGTTAATA | |
| | UA | | | |
| E_26269 | ACAGGUACG | 61 | TTCGTTTCGGAAGAGACAGGTACGTTA | 169 |
| | UUAAUAGU | | ATAGTTAATAGCGTACTT | |
| | UAA | | | |
| E_26277 | GUUAAUAG | 62 | GGAAGAGACAGGTACGTTAATAGTTA | 170 |
| | UUAAUAGCG | | ATAGCGTACTTCTTTTTCT | |
| | UAC | | | |
| E_26305 | CUUGCUUUC | 63 | AGCGTACTTCTTTTTCTTGCTTTCGTGG | 171 |
| | GUGGUAUUC | | TATTCTTGCTAGTTACA | |
| | UU | | | |
| E_26313 | CGUGGUAUU | 64 | TCTTTTTCTTGCTTTCGTGGTATTCTTG | 172 |
| | CUUGCUAGU | | CTAGTTACACTAGCCAT | |
| | UA | | | |
| E_26369 | ACUGCUGCA | 65 | TTCGATTGTGTGCGTACTGCTGCAATA | 173 |
| | AUAUUGUU | | TTGTTAACGTGAGTCTTG | |
| | AAC | | | |
| E_26374 | UGCAAUAUU | 66 | TTGTGTGCGTACTGCTGCAATATTGTT | 174 |
| | GUUAACGUG | | AACGTGAGTCTTGTAAAA | |
| | AG | | | |
| E_26455 | CCUGAUCUU | 67 | AATTCTTCTAGAGTTCCTGATCTTCTGG | 175 |
| | CUGGUCUAA | | TCTAAACGAACTAAATA | |
| | AC | | | |
| E_26463 | UCUGGUCUA | 68 | TAGAGTTCCTGATCTTCTGGTCTAAAC | 176 |
| | AACGAACUA | | GAACTAAATATTATATTA | |
| | AA | | | |
| E_26467 | GUCUAAACG | 69 | GTTCCTGATCTTCTGGTCTAAACGAAC | 177 |
| | AACUAAAUA | | TAAATATTATATTAGTTT | |
| | UU | | | |
| E_26470 | UAAACGAAC | 70 | CCTGATCTTCTGGTCTAAACGAACTAA | 178 |
| | UAAAUAUU | | ATATTATATTAGTTTTTC | |
| | AUA | | | |
| M_26573 | UGAACAAUG | 71 | GCTTAAAAAGCTCCTTGAACAATGGAA | 179 |
| | GAACCUAGU | | CCTAGTAATAGGTTTCCT | |
| | AA | | | |
| M_26581 | GGAACCUAG | 72 | AGCTCCTTGAACAATGGAACCTAGTAA | 180 |
| | UAAUAGGU | | TAGGTTTCCTATTCCTTA | |
| | UUC | | | |
| M_26602 | UAUUCCUUA | 73 | TAGTAATAGGTTTCCTATTCCTTACAT | 181 |
| | CAUGGAUUU | | GGATTTGTCTTCTACAAT | |
| | GU | | | |
| M_26624 | UCUACAAUU | 74 | TACATGGATTTGTCTTCTACAATTTGCC | 182 |
| | UGCCUAUGC | | TATGCCAACAGGAATAG | |
| | CA | | | |
| M_26637 | UAUGCCAAC | 75 | CTTCTACAATTTGCCTATGCCAACAGG | 183 |
| | AGGAAUAG | | AATAGGTTTTTGTATATA | |
| | GUU | | | |
| M_26638 | AUGCCAACA | 76 | TTCTACAATTTGCCTATGCCAACAGGA | 184 |
| | GGAAUAGG | | ATAGGTTTTTGTATATAA | |
| | UUU | | | |
| M_26693 | AUGGCCAGU | 77 | TTTCCTCTGGCTGTTATGGCCAGTAAC | 185 |
| | AACUUUAGC | | TTTAGCTTGTTTTGTGCT | |
| | UU | | | |
| M_26717 | UGUGCUUGC | 78 | AACTTTAGCTTGTTTTGTGCTTGCTGCT | 186 |
| | UGCUGUUUA | | GTTTACAGAATAAATTG | |
| | CA | | | |
| M_27014 | GCCUAAAGA | 79 | TGACATCAAGGACCTGCCTAAAGAAA | 187 |
| | AAUCACUGU | | TCACTGTTGCTACATCACG | |
| | UG | | | |
| M_27032 | UGCUACAUC | 80 | TAAAGAAATCACTGTTGCTACATCACG | 188 |
| | ACGAACGCU | | AACGCTTTCTTATTACAA | |
| | UU | | | |
| M_27035 | UACAUCACG | 81 | AGAAATCACTGTTGCTACATCACGAAC | 189 |
| | AACGCUUUC | | GCTTTCTTATTACAAATT | |
| | UU | | | |
| M_27123 | AUUGGCAAC | 82 | TACAGTCGCTACAGGATTGGCAACTAT | 190 |
| | UAUAAAUU | | AAATTAAACACAGACCAT | |
| | AAA | | | |
| 7a_27455 | AAGAGUGU | 83 | AGCTTTATCACTACCAAGAGTGTGTTA | 191 |
| | GUUAGAGG | | GAGGTACAACAGTACTTT | |
| | UACA | | | |
| 7a_27522 | UUCACCAUU | 84 | AACATACGAGGGCAATTCACCATTTCA | 192 |
| | UCAUCCUCU | | TCCTCTAGCTGATAACAA | |
| | AG | | | |
| 7a_27537 | UCUAGCUGA | 85 | TTCACCATTTCATCCTCTAGCTGATAA | 193 |
| | UAACAAAUU | | CAAATTTGCACTGACTTG | |
| | UG | | | |
| 7a_27553 | UUUGCACUG | 86 | CTAGCTGATAACAAATTTGCACTGACT | 194 |
| | ACUUGCUUU | | TGCTTTAGCACTCAATTT | |
| | AG | | | |
| 7a_27565 | UGCUUUAGC | 87 | AAATTTGCACTGACTTGCTTTAGCACT | 195 |
| | ACUCAAUUU | | CAATTTGCTTTTGCTTGT | |
| | GC | | | |
| 7a_27633 | AUCAGUUUC | 88 | TCAGTTACGTGCCAGATCAGTTTCACC | 196 |
| | ACCUAAACU | | TAAACTGTTCATCAGACA | |
| | GU | | | |
| 7a_27656 | UCAGACAAG | 89 | CACCTAAACTGTTCATCAGACAAGAGG | 197 |
| | AGGAAGUUC | | AAGTTCAAGAACTTTACT | |
| | AA | | | |
| 7a_27671 | UUCAAGAAC | 90 | TCAGACAAGAGGAAGTTCAAGAACTT | 198 |
| | UUUACUCUC | | TACTCTCCAATTTTTCTTA | |
| | CA | | | |
| 7a_27705 | UGCGGCAAU | 91 | AATTTTTCTTATTGTTGCGGCAATAGT | 199 |
| | AGUGUUUA | | GTTTATAACACTTTGCTT | |
| | UAA | | | |
| 7a_27715 | GUGUUUAU | 92 | ATTGTTGCGGCAATAGTGTTTATAACA | 200 |
| | AACACUUUG | | CTTTGCTTCACACTCAAA | |
| | CUU | | | |
| 7a_27720 | UAUAACACU | 93 | TGCGGCAATAGTGTTTATAACACTTTG | 201 |
| | UUGCUUCAC | | CTTCACACTCAAAAGAAA | |
| | AC | | | |
| 7a_27751 | ACAGAAUGA | 94 | ACACTCAAAAGAAAGACAGAATGATT | 202 |
| | UUGAACUUU | | GAACTTTCATTAATTGACT | |
| | CA | | | |
| 8b_27932 | AGCUGCAUU | 95 | AATCATCACAACTGTAGCTGCATTTCA | 203 |
| | UCACCAAGA | | CCAAGAATGTAGTTTACA | |
| | AU | | | |
| 8b_27940 | UUCACCAAG | 96 | CAACTGTAGCTGCATTTCACCAAGAAT | 204 |
| | AAUGUAGU | | GTAGTTTACAGTCATGTA | |
| | UUA | | | |
| 8b_27986 | UGUAGUUG | 97 | TCAACATCAACCATATGTAGTTGATGA | 205 |
| | AUGACCCGU | | CCCGTGTCCTATTCACTT | |
| | GUC | | | |
| 8b_28002 | UGUCCUAUU | 98 | GTAGTTGATGACCCGTGTCCTATTCAC | 206 |
| | CACUUCUAU | | TTCTATTCTAAATGGTAT | |
| | UC | | | |
| 8b_28024 | AAUGGUAU | 99 | TTCACTTCTATTCTAAATGGTATATTAG | 207 |
| | AUUAGAGU | | AGTAGGAGCTAGAAAAT | |
| | AGGA | | | |
| 8b_28091 | UUCUAAAUC | 100 | CGTGGATGAGGCTGGTTCTAAATCACC | 208 |
| | ACCCAUUCA | | CATTCAGTACATCGATAT | |
| | GU | | | |
| 8b_28119 | AUCGGUAAU | 101 | ATTCAGTACATCGATATCGGTAATTAT | 209 |
| | UAUACAGUU | | ACAGTTTCCTGTTTACCT | |
| | UC | | | |
| 8b_28127 | UUAUACAGU | 102 | CATCGATATCGGTAATTATACAGTTTC | 210 |
| | UUCCUGUUU | | CTGTTTACCTTTTACAAT | |
| | AC | | | |
| 8b_28128 | UAUACAGUU | 103 | ATCGATATCGGTAATTATACAGTTTCC | 211 |
| | UCCUGUUUA | | TGTTTACCTTTTACAATT | |
| | CC | | | |
| 8b_28163 | CCAGGAACC | 104 | TTTTACAATTAATTGCCAGGAACCTAA | 212 |
| | UAAAUUGG | | ATTGGGTAGTCTTGTAGT | |
| | GUA | | | |
| 8b_28218 | UUAGAGUA | 105 | TTCTATGAAGACTTTTTAGAGTATCAT | 213 |
| | UCAUGACGU | | GACGTTCGTGTTGTTTTA | |
| | UCG | | | |
| 8b_28222 | AGUAUCAUG | 106 | ATGAAGACTTTTTAGAGTATCATGACG | 214 |
| | ACGUUCGUG | | TTCGTGTTGTTTTAGATT | |
| | UU | | | |
| N_28407 | UACCCAAUA | 107 | GTCGGCCCCAAGGTTTACCCAATAATA | 215 |
| | AUACUGCGU | | CTGCGTCTTGGTTCACCG | |
| | CU | | | |
| N_28655 | GACGGCAUC | 108 | TATGGTGCTAACAAAGACGGCATCATA | 216 |
| | AUAUGGGU | | TGGGTTGCAACTGAGGGA | |
| | UGC | | | |
| N_28945 | UGACAGAUU | 109 | TGCTTTGCTGCTGCTTGACAGATTGAA | 217 |
| | GAACCAGCU | | CCAGCTTGAGAGCAAAAT | |
| | UG | | | |
| N_28992 | AACAACAAG | 110 | CTGGTAAAGGCCAACAACAACAAGGC | 218 |
| | GCCAAACUG | | CAAACTGTCACTAAGAAAT | |
| | UC | | | |
| N_29141 | GAACUAAUC | 111 | AATTTTGGGGACCAGGAACTAATCAG | 219 |
| | AGACAAGGA | | ACAAGGAACTGATTACAAA | |
| | AC | | | |
| N_29276 | GGUGCCAUC | 112 | TGGTTGACCTACACAGGTGCCATCAAA | 220 |
| | AAAUUGGA | | TTGGATGACAAAGATCCA | |
| | UGA | | | |
| N_29292 | AUGACAAAG | 113 | GTGCCATCAAATTGGATGACAAAGATC | 221 |
| | AUCCAAAUU | | CAAATTTCAAAGATCAAG | |
| | UC | | | |
| N_29293 | UGACAAAGA | 114 | TGCCATCAAATTGGATGACAAAGATCC | 222 |
| | UCCAAAUUU | | AAATTTCAAAGATCAAGT | |
| | CA | | | |
| N_29303 | CCAAAUUUC | 115 | TTGGATGACAAAGATCCAAATTTCAAA | 223 |
| | AAAGAUCAA | | GATCAAGTCATTTTGCTG | |
| | GU | | | |
| N_29307 | AUUUCAAAG | 116 | ATGACAAAGATCCAAATTTCAAAGATC | 224 |
| | AUCAAGUCA | | AAGTCATTTTGCTGAATA | |
| | UU | | | |
| N_29328 | UGCUGAAUA | 117 | AAGATCAAGTCATTTTGCTGAATAAGC | 225 |
| | AGCAUAUUG | | ATATTGACGCATACAAAA | |
| | AC | | | |
| N_29464 | UGCAGAUUU | 118 | GACTCTTCTTCCTGCTGCAGATTTGGA | 226 |
| | GGAUGAUU | | TGATTTCTCCAAACAATT | |
| | UCU | | | |

TABLE 6B
Modified antisense strand (21 nucleotide length for screening)

| Sequence | | SEQ |
|---|---|---|
| ID | Modified AS strand (21mer for screening) | ID NO: |
| orf1ab_14080 | P(mU)#(fA)#(mA)(mC)(mA)(fU)(mG)(mA)(mA)(mU)(mA)(mC)(mU)(fU)#(mG)#(fG)#(mC)#(mU)#(mU)#(mU)#(mU) | 227 |
| orf1ab_14361 | P(mU)#(fA)#(mA)(mC)(mA)(fU)(mG)(mA)(mA)(mU)(mA)(mC)(mU)(fU)#(mG)#(fG)#(mC)#(mU)#(mU)#(mU)#(mU) | 227 |
| orf1ab_14830 | P(mU)#(fA)#(mA)(mC)(mA)(fU)(mG)(mA)(mA)(mU)(mA)(mC)(mU)(fU)#(mG)#(fG)#(mC)#(mU)#(mU)#(mU)#(mU) | 227 |
| orf1ab_15376 | P(mU)#(fA)#(mA)(mC)(mA)(fU)(mG)(mA)(mA)(mU)(mA)(mC)(mU)(fU)#(mG)#(fG)#(mC)#(mU)#(mU)#(mU)#(mU) | 227 |
| orf1ab_15786 | P(mU)#(fA)#(mA)(mC)(mA)(fU)(mG)(mA)(mA)(mU)(mA)(mC)(mU)(fU)#(mG)#(fG)#(mC)#(mU)#(mU)#(mU)#(mU) | 227 |
| orf1ab_17107 | P(mU)#(fA)#(mA)(mC)(mA)(fU)(mG)(mA)(mA)(mU)(mA)(mC)(mU)(fU)#(mG)#(fG)#(mC)#(mU)#(mU)#(mU)#(mU) | 227 |
| orf1ab_17370 | P(mU)#(fA)#(mA)(mC)(mA)(fU)(mG)(mA)(mA)(mU)(mA)(mC)(mU)(fU)#(mG)#(fG)#(mC)#(mU)#(mU)#(mU)#(mU) | 227 |
| orf1ab_18025 | P(mU)#(fA)#(mA)(mC)(mA)(fU)(mG)(mA)(mA)(mU)(mA)(mC)(mU)(fU)#(mG)#(fG)#(mC)#(mU)#(mU)#(mU)#(mU) | 227 |
| orf1ab_18571 | P(mU)#(fA)#(mA)(mC)(mA)(fU)(mG)(mA)(mA)(mU)(mA)(mC)(mU)(fU)#(mG)#(fG)#(mC)#(mU)#(mU)#(mU)#(mU) | 227 |
| orf1ab_20497 | P(mU)#(fA)#(mA)(mC)(mA)(fU)(mG)(mA)(mA)(mU)(mA)(mC)(mU)(fU)#(mG)#(fG)#(mC)#(mU)#(mU)#(mU)#(mU) | 227 |
| orf1ab_20892 | P(mU)#(fA)#(mA)(mC)(mA)(fU)(mG)(mA)(mA)(mU)(mA)(mC)(mU)(fU)#(mG)#(fG)#(mC)#(mU)#(mU)#(mU)#(mU) | 227 |
| orf1ab_21391 | P(mU)#(fA)#(mA)(mC)(mA)(fU)(mG)(mA)(mA)(mU)(mA)(mC)(mU)(fU)#(mG)#(fG)#(mC)#(mU)#(mU)#(mU)#(mU) | 227 |
| orf1a_416 | P(mU)#(fA)#(mA)(mC)(mA)(fU)(mG)(mA)(mA)(mU)(mA)(mC)(mU)(fU)#(mG)#(fG)#(mC)#(mU)#(mU)#(mU)#(mU) | 227 |
| orf1a_2290 | P(mU)#(fA)#(mA)(mC)(mA)(fU)(mG)(mA)(mA)(mU)(mA)(mC)(mU)(fU)#(mG)#(fG)#(mC)#(mU)#(mU)#(mU)#(mU) | 227 |
| orf1a_6059 | P(mU)#(fA)#(mA)(mC)(mA)(fU)(mG)(mA)(mA)(mU)(mA)(mC)(mU)(fU)#(mG)#(fG)#(mC)#(mU)#(mU)#(mU)#(mU) | 227 |
| orf1a_6322 | P(mU)#(fA)#(mA)(mC)(mA)(fU)(mG)(mA)(mA)(mU)(mA)(mC)(mU)(fU)#(mG)#(fG)#(mC)#(mU)#(mU)#(mU)#(mU) | 227 |
| orf1a_6499 | P(mU)#(fA)#(mA)(mC)(mA)(fU)(mG)(mA)(mA)(mU)(mA)(mC)(mU)(fU)#(mG)#(fG)#(mC)#(mU)#(mU)#(mU)#(mU) | 227 |
| orf1a_7643 | P(mU)#(fA)#(mA)(mC)(mA)(fU)(mG)(mA)(mA)(mU)(mA)(mC)(mU)(fU)#(mG)#(fG)#(mC)#(mU)#(mU)#(mU)#(mU) | 227 |
| orf1a_8200 | P(mU)#(fA)#(mA)(mC)(mA)(fU)(mG)(mA)(mA)(mU)(mA)(mC)(mU)(fU)#(mG)#(fG)#(mC)#(mU)#(mU)#(mU)#(mU) | 227 |
| orf1a_8201 | P(mU)#(fA)#(mA)(mC)(mA)(fU)(mG)(mA)(mA)(mU)(mA)(mC)(mU)(fU)#(mG)#(fG)#(mC)#(mU)#(mU)#(mU)#(mU) | 227 |
| orf1a_8744 | P(mU)#(fA)#(mA)(mC)(mA)(fU)(mG)(mA)(mA)(mU)(mA)(mC)(mU)(fU)#(mG)#(fG)#(mC)#(mU)#(mU)#(mU)#(mU) | 227 |
| orf1a_9679 | P(mU)#(fA)#(mA)(mC)(mA)(fU)(mG)(mA)(mA)(mU)(mA)(mC)(mU)(fU)#(mG)#(fG)#(mC)#(mU)#(mU)#(mU)#(mU) | 227 |
| orf1a_11594 | P(mU)#(fA)#(mA)(mC)(mA)(fU)(mG)(mA)(mA)(mU)(mA)(mC)(mU)(fU)#(mG)#(fG)#(mC)#(mU)#(mU)#(mU)#(mU) | 227 |
| orf1a_12932 | P(mU)#(fA)#(mA)(mC)(mA)(fU)(mG)(mA)(mA)(mU)(mA)(mC)(mU)(fU)#(mG)#(fG)#(mC)#(mU)#(mU)#(mU)#(mU) | 227 |
| S_21944 | P(mU)#(fA)#(mA)(mC)(mA)(fU)(mG)(mA)(mA)(mU)(mA)(mC)(mU)(fU)#(mG)#(fG)#(mC)#(mU)#(mU)#(mU)#(mU) | 227 |
| S_22223 | P(mU)#(fA)#(mA)(mC)(mA)(fU)(mG)(mA)(mA)(mU)(mA)(mC)(mU)(fU)#(mG)#(fG)#(mC)#(mU)#(mU)#(mU)#(mU) | 227 |
| S_22550 | P(mU)#(fA)#(mA)(mC)(mA)(fU)(mG)(mA)(mA)(mU)(mA)(mC)(mU)(fU)#(mG)#(fG)#(mC)#(mU)#(mU)#(mU)#(mU) | 227 |
| S_22820 | P(mU)#(fA)#(mA)(mC)(mA)(fU)(mG)(mA)(mA)(mU)(mA)(mC)(mU)(fU)#(mG)#(fG)#(mC)#(mU)#(mU)#(mU)#(mU) | 227 |
| S_22898 | P(mU)#(fA)#(mA)(mC)(mA)(fU)(mG)(mA)(mA)(mU)(mA)(mC)(mU)(fU)#(mG)#(fG)#(mC)#(mU)#(mU)#(mU)#(mU) | 227 |
| S_23174 | P(mU)#(fA)#(mA)(mC)(mA)(fU)(mG)(mA)(mA)(mU)(mA)(mC)(mU)(fU)#(mG)#(fG)#(mC)#(mU)#(mU)#(mU)#(mU) | 227 |
| S_23239 | P(mU)#(fA)#(mA)(mC)(mA)(fU)(mG)(mA)(mA)(mU)(mA)(mC)(mU)(fU)#(mG)#(fG)#(mC)#(mU)#(mU)#(mU)#(mU) | 227 |
| S_23240 | P(mU)#(fA)#(mA)(mC)(mA)(fU)(mG)(mA)(mA)(mU)(mA)(mC)(mU)(fU)#(mG)#(fG)#(mC)#(mU)#(mU)#(mU)#(mU) | 227 |
| S_23774 | P(mU)#(fA)#(mA)(mC)(mA)(fU)(mG)(mA)(mA)(mU)(mA)(mC)(mU)(fU)#(mG)#(fG)#(mC)#(mU)#(mU)#(mU)#(mU) | 227 |
| S_24056 | P(mU)#(fA)#(mA)(mC)(mA)(fU)(mG)(mA)(mA)(mU)(mA)(mC)(mU)(fU)#(mG)#(fG)#(mC)#(mU)#(mU)#(mU)#(mU) | 227 |
| S_24289 | P(mU)#(fA)#(mA)(mC)(mA)(fU)(mG)(mA)(mA)(mU)(mA)(mC)(mU)(fU)#(mG)#(fG)#(mC)#(mU)#(mU)#(mU)#(mU) | 227 |
| S_25375 | P(mU)#(fA)#(mA)(mC)(mA)(fU)(mG)(mA)(mA)(mU)(mA)(mC)(mU)(fU)#(mG)#(fG)#(mC)#(mU)#(mU)#(mU)#(mU) | 227 |
| 3a_25413 | P(mU)#(fA)#(mA)(mC)(mA)(fU)(mG)(mA)(mA)(mU)(mA)(mC)(mU)(fU)#(mG)#(fG)#(mC)#(mU)#(mU)#(mU)#(mU) | 227 |
| 3a_25630 | P(mU)#(fA)#(mA)(mC)(mA)(fU)(mG)(mA)(mA)(mU)(mA)(mC)(mU)(fU)#(mG)#(fG)#(mC)#(mU)#(mU)#(mU)#(mU) | 227 |
| 3a_25717 | P(mU)#(fA)#(mA)(mC)(mA)(fU)(mG)(mA)(mA)(mU)(mA)(mC)(mU)(fU)#(mG)#(fG)#(mC)#(mU)#(mU)#(mU)#(mU) | 227 |
| 3a_25734 | P(mU)#(fA)#(mA)(mC)(mA)(fU)(mG)(mA)(mA)(mU)(mA)(mC)(mU)(fU)#(mG)#(fG)#(mC)#(mU)#(mU)#(mU)#(mU) | 227 |
| 3a_25736 | P(mU)#(fA)#(mA)(mC)(mA)(fU)(mG)(mA)(mA)(mU)(mA)(mC)(mU)(fU)#(mG)#(fG)#(mC)#(mU)#(mU)#(mU)#(mU) | 227 |
| 3a_25745 | P(mU)#(fA)#(mA)(mC)(mA)(fU)(mG)(mA)(mA)(mU)(mA)(mC)(mU)(fU)#(mG)#(fG)#(mC)#(mU)#(mU)#(mU)#(mU) | 227 |
| 3a_25868 | P(mU)#(fA)#(mA)(mC)(mA)(fU)(mG)(mA)(mA)(mU)(mA)(mC)(mU)(fU)#(mG)#(fG)#(mC)#(mU)#(mU)#(mU)#(mU) | 227 |
| 3a_25870 | P(mU)#(fA)#(mA)(mC)(mA)(fU)(mG)(mA)(mA)(mU)(mA)(mC)(mU)(fU)#(mG)#(fG)#(mC)#(mU)#(mU)#(mU)#(mU) | 227 |
| 3a_25914 | P(mU)#(fA)#(mA)(mC)(mA)(fU)(mG)(mA)(mA)(mU)(mA)(mC)(mU)(fU)#(mG)#(fG)#(mC)#(mU)#(mU)#(mU)#(mU) | 227 |
| 3a_25992 | P(mU)#(fA)#(mA)(mC)(mA)(fU)(mG)(mA)(mA)(mU)(mA)(mC)(mU)(fU)#(mG)#(fG)#(mC)#(mU)#(mU)#(mU)#(mU) | 227 |
| 3a_26018 | P(mU)#(fA)#(mA)(mC)(mA)(fU)(mG)(mA)(mA)(mU)(mA)(mC)(mU)(fU)#(mG)#(fG)#(mC)#(mU)#(mU)#(mU)#(mU) | 227 |
| 3a_26066 | P(mU)#(fA)#(mA)(mC)(mA)(fU)(mG)(mA)(mA)(mU)(mA)(mC)(mU)(fU)#(mG)#(fG)#(mC)#(mU)#(mU)#(mU)#(mU) | 227 |
| E_26258 | P(mU)#(fA)#(mA)(mC)(mA)(fU)(mG)(mA)(mA)(mU)(mA)(mC)(mU)(fU)#(mG)#(fG)#(mC)#(mU)#(mU)#(mU)#(mU) | 227 |
| E_26261 | P(mU)#(fA)#(mA)(mC)(mA)(fU)(mG)(mA)(mA)(mU)(mA)(mC)(mU)(fU)#(mG)#(fG)#(mC)#(mU)#(mU)#(mU)#(mU) | 227 |
| E_26269 | P(mU)#(fA)#(mA)(mC)(mA)(fU)(mG)(mA)(mA)(mU)(mA)(mC)(mU)(fU)#(mG)#(fG)#(mC)#(mU)#(mU)#(mU)#(mU) | 227 |
| E_26277 | P(mU)#(fA)#(mA)(mC)(mA)(fU)(mG)(mA)(mA)(mU)(mA)(mC)(mU)(fU)#(mG)#(fG)#(mC)#(mU)#(mU)#(mU)#(mU) | 227 |
| E_26305 | P(mU)#(fA)#(mA)(mC)(mA)(fU)(mG)(mA)(mA)(mU)(mA)(mC)(mU)(fU)#(mG)#(fG)#(mC)#(mU)#(mU)#(mU)#(mU) | 227 |
| E_26313 | P(mU)#(fA)#(mA)(mC)(mA)(fU)(mG)(mA)(mA)(mU)(mA)(mC)(mU)(fU)#(mG)#(fG)#(mC)#(mU)#(mU)#(mU)#(mU) | 227 |
| E_26369 | P(mU)#(fA)#(mA)(mC)(mA)(fU)(mG)(mA)(mA)(mU)(mA)(mC)(mU)(fU)#(mG)#(fG)#(mC)#(mU)#(mU)#(mU)#(mU) | 227 |
| E_26374 | P(mU)#(fA)#(mA)(mC)(mA)(fU)(mG)(mA)(mA)(mU)(mA)(mC)(mU)(fU)#(mG)#(fG)#(mC)#(mU)#(mU)#(mU)#(mU) | 227 |
| E_26455 | P(mU)#(fA)#(mA)(mC)(mA)(fU)(mG)(mA)(mA)(mU)(mA)(mC)(mU)(fU)#(mG)#(fG)#(mC)#(mU)#(mU)#(mU)#(mU) | 227 |
| E_26463 | P(mU)#(fA)#(mA)(mC)(mA)(fU)(mG)(mA)(mA)(mU)(mA)(mC)(mU)(fU)#(mG)#(fG)#(mC)#(mU)#(mU)#(mU)#(mU) | 227 |
| E_26467 | P(mU)#(fA)#(mA)(mC)(mA)(fU)(mG)(mA)(mA)(mU)(mA)(mC)(mU)(fU)#(mG)#(fG)#(mC)#(mU)#(mU)#(mU)#(mU) | 227 |
| E_26470 | P(mU)#(fA)#(mA)(mC)(mA)(fU)(mG)(mA)(mA)(mU)(mA)(mC)(mU)(fU)#(mG)#(fG)#(mC)#(mU)#(mU)#(mU)#(mU) | 227 |
| M_26573 | P(mU)#(fA)#(mA)(mC)(mA)(fU)(mG)(mA)(mA)(mU)(mA)(mC)(mU)(fU)#(mG)#(fG)#(mC)#(mU)#(mU)#(mU)#(mU) | 227 |
| M_26581 | P(mU)#(fA)#(mA)(mC)(mA)(fU)(mG)(mA)(mA)(mU)(mA)(mC)(mU)(fU)#(mG)#(fG)#(mC)#(mU)#(mU)#(mU)#(mU) | 227 |
| M_26602 | P(mU)#(fA)#(mA)(mC)(mA)(fU)(mG)(mA)(mA)(mU)(mA)(mC)(mU)(fU)#(mG)#(fG)#(mC)#(mU)#(mU)#(mU)#(mU) | 227 |
| M_26624 | P(mU)#(fA)#(mA)(mC)(mA)(fU)(mG)(mA)(mA)(mU)(mA)(mC)(mU)(fU)#(mG)#(fG)#(mC)#(mU)#(mU)#(mU)#(mU) | 227 |
| M_26637 | P(mU)#(fA)#(mA)(mC)(mA)(fU)(mG)(mA)(mA)(mU)(mA)(mC)(mU)(fU)#(mG)#(fG)#(mC)#(mU)#(mU)#(mU)#(mU) | 227 |
| M_26638 | P(mU)#(fA)#(mA)(mC)(mA)(fU)(mG)(mA)(mA)(mU)(mA)(mC)(mU)(fU)#(mG)#(fG)#(mC)#(mU)#(mU)#(mU)#(mU) | 227 |
| M_26693 | P(mU)#(fA)#(mA)(mC)(mA)(fU)(mG)(mA)(mA)(mU)(mA)(mC)(mU)(fU)#(mG)#(fG)#(mC)#(mU)#(mU)#(mU)#(mU) | 227 |
| M_26717 | P(mU)#(fA)#(mA)(mC)(mA)(fU)(mG)(mA)(mA)(mU)(mA)(mC)(mU)(fU)#(mG)#(fG)#(mC)#(mU)#(mU)#(mU)#(mU) | 227 |
| M_27014 | P(mU)#(fA)#(mA)(mC)(mA)(fU)(mG)(mA)(mA)(mU)(mA)(mC)(mU)(fU)#(mG)#(fG)#(mC)#(mU)#(mU)#(mU)#(mU) | 227 |
| M_27032 | P(mU)#(fA)#(mA)(mC)(mA)(fU)(mG)(mA)(mA)(mU)(mA)(mC)(mU)(fU)#(mG)#(fG)#(mC)#(mU)#(mU)#(mU)#(mU) | 227 |
| M_27035 | P(mU)#(fA)#(mA)(mC)(mA)(fU)(mG)(mA)(mA)(mU)(mA)(mC)(mU)(fU)#(mG)#(fG)#(mC)#(mU)#(mU)#(mU)#(mU) | 227 |
| M_27123 | P(mU)#(fA)#(mA)(mC)(mA)(fU)(mG)(mA)(mA)(mU)(mA)(mC)(mU)(fU)#(mG)#(fG)#(mC)#(mU)#(mU)#(mU)#(mU) | 227 |
| 7a_27455 | P(mU)#(fA)#(mA)(mC)(mA)(fU)(mG)(mA)(mA)(mU)(mA)(mC)(mU)(fU)#(mG)#(fG)#(mC)#(mU)#(mU)#(mU)#(mU) | 227 |
| 7a_27522 | P(mU)#(fA)#(mA)(mC)(mA)(fU)(mG)(mA)(mA)(mU)(mA)(mC)(mU)(fU)#(mG)#(fG)#(mC)#(mU)#(mU)#(mU)#(mU) | 227 |
| 7a_27537 | P(mU)#(fA)#(mA)(mC)(mA)(fU)(mG)(mA)(mA)(mU)(mA)(mC)(mU)(fU)#(mG)#(fG)#(mC)#(mU)#(mU)#(mU)#(mU) | 227 |
| 7a_27553 | P(mU)#(fA)#(mA)(mC)(mA)(fU)(mG)(mA)(mA)(mU)(mA)(mC)(mU)(fU)#(mG)#(fG)#(mC)#(mU)#(mU)#(mU)#(mU) | 227 |
| 7a_27565 | P(mU)#(fA)#(mA)(mC)(mA)(fU)(mG)(mA)(mA)(mU)(mA)(mC)(mU)(fU)#(mG)#(fG)#(mC)#(mU)#(mU)#(mU)#(mU) | 227 |
| 7a_27633 | P(mU)#(fA)#(mA)(mC)(mA)(fU)(mG)(mA)(mA)(mU)(mA)(mC)(mU)(fU)#(mG)#(fG)#(mC)#(mU)#(mU)#(mU)#(mU) | 227 |
| 7a_27656 | P(mU)#(fA)#(mA)(mC)(mA)(fU)(mG)(mA)(mA)(mU)(mA)(mC)(mU)(fU)#(mG)#(fG)#(mC)#(mU)#(mU)#(mU)#(mU) | 227 |
| 7a_27671 | P(mU)#(fA)#(mA)(mC)(mA)(fU)(mG)(mA)(mA)(mU)(mA)(mC)(mU)(fU)#(mG)#(fG)#(mC)#(mU)#(mU)#(mU)#(mU) | 227 |
| 7a_27705 | P(mU)#(fA)#(mA)(mC)(mA)(fU)(mG)(mA)(mA)(mU)(mA)(mC)(mU)(fU)#(mG)#(fG)#(mC)#(mU)#(mU)#(mU)#(mU) | 227 |
| 7a_27715 | P(mU)#(fA)#(mA)(mC)(mA)(fU)(mG)(mA)(mA)(mU)(mA)(mC)(mU)(fU)#(mG)#(fG)#(mC)#(mU)#(mU)#(mU)#(mU) | 227 |
| 7a_27720 | P(mU)#(fA)#(mA)(mC)(mA)(fU)(mG)(mA)(mA)(mU)(mA)(mC)(mU)(fU)#(mG)#(fG)#(mC)#(mU)#(mU)#(mU)#(mU) | 227 |
| 7a_27751 | P(mU)#(fA)#(mA)(mC)(mA)(fU)(mG)(mA)(mA)(mU)(mA)(mC)(mU)(fU)#(mG)#(fG)#(mC)#(mU)#(mU)#(mU)#(mU) | 227 |
| 8b_27932 | P(mU)#(fA)#(mA)(mC)(mA)(fU)(mG)(mA)(mA)(mU)(mA)(mC)(mU)(fU)#(mG)#(fG)#(mC)#(mU)#(mU)#(mU)#(mU) | 227 |
| 8b_27940 | P(mU)#(fA)#(mA)(mC)(mA)(fU)(mG)(mA)(mA)(mU)(mA)(mC)(mU)(fU)#(mG)#(fG)#(mC)#(mU)#(mU)#(mU)#(mU) | 227 |
| 8b_27986 | P(mU)#(fA)#(mA)(mC)(mA)(fU)(mG)(mA)(mA)(mU)(mA)(mC)(mU)(fU)#(mG)#(fG)#(mC)#(mU)#(mU)#(mU)#(mU) | 227 |
| 8b_28002 | P(mU)#(fA)#(mA)(mC)(mA)(fU)(mG)(mA)(mA)(mU)(mA)(mC)(mU)(fU)#(mG)#(fG)#(mC)#(mU)#(mU)#(mU)#(mU) | 227 |
| 8b_28024 | P(mU)#(fA)#(mA)(mC)(mA)(fU)(mG)(mA)(mA)(mU)(mA)(mC)(mU)(fU)#(mG)#(fG)#(mC)#(mU)#(mU)#(mU)#(mU) | 227 |
| 8b_28091 | P(mU)#(fA)#(mA)(mC)(mA)(fU)(mG)(mA)(mA)(mU)(mA)(mC)(mU)(fU)#(mG)#(fG)#(mC)#(mU)#(mU)#(mU)#(mU) | 227 |
| 8b_28119 | P(mU)#(fA)#(mA)(mC)(mA)(fU)(mG)(mA)(mA)(mU)(mA)(mC)(mU)(fU)#(mG)#(fG)#(mC)#(mU)#(mU)#(mU)#(mU) | 227 |
| 8b_28127 | P(mU)#(fA)#(mA)(mC)(mA)(fU)(mG)(mA)(mA)(mU)(mA)(mC)(mU)(fU)#(mG)#(fG)#(mC)#(mU)#(mU)#(mU)#(mU) | 227 |
| 8b_28128 | P(mU)#(fA)#(mA)(mC)(mA)(fU)(mG)(mA)(mA)(mU)(mA)(mC)(mU)(fU)#(mG)#(fG)#(mC)#(mU)#(mU)#(mU)#(mU) | 227 |
| 8b_28163 | P(mU)#(fA)#(mA)(mC)(mA)(fU)(mG)(mA)(mA)(mU)(mA)(mC)(mU)(fU)#(mG)#(fG)#(mC)#(mU)#(mU)#(mU)#(mU) | 227 |
| 8b_28218 | P(mU)#(fA)#(mA)(mC)(mA)(fU)(mG)(mA)(mA)(mU)(mA)(mC)(mU)(fU)#(mG)#(fG)#(mC)#(mU)#(mU)#(mU)#(mU) | 227 |
| 8b_28222 | P(mU)#(fA)#(mA)(mC)(mA)(fU)(mG)(mA)(mA)(mU)(mA)(mC)(mU)(fU)#(mG)#(fG)#(mC)#(mU)#(mU)#(mU)#(mU) | 227 |
| N_28407 | P(mU)#(fA)#(mA)(mC)(mA)(fU)(mG)(mA)(mA)(mU)(mA)(mC)(mU)(fU)#(mG)#(fG)#(mC)#(mU)#(mU)#(mU)#(mU) | 227 |
| N_28655 | P(mU)#(fA)#(mA)(mC)(mA)(fU)(mG)(mA)(mA)(mU)(mA)(mC)(mU)(fU)#(mG)#(fG)#(mC)#(mU)#(mU)#(mU)#(mU) | 227 |
| N_28945 | P(mU)#(fA)#(mA)(mC)(mA)(fU)(mG)(mA)(mA)(mU)(mA)(mC)(mU)(fU)#(mG)#(fG)#(mC)#(mU)#(mU)#(mU)#(mU) | 227 |
| N_28992 | P(mU)#(fA)#(mA)(mC)(mA)(fU)(mG)(mA)(mA)(mU)(mA)(mC)(mU)(fU)#(mG)#(fG)#(mC)#(mU)#(mU)#(mU)#(mU) | 227 |
| N_29141 | P(mU)#(fA)#(mA)(mC)(mA)(fU)(mG)(mA)(mA)(mU)(mA)(mC)(mU)(fU)#(mG)#(fG)#(mC)#(mU)#(mU)#(mU)#(mU) | 227 |
| N_29276 | P(mU)#(fA)#(mA)(mC)(mA)(fU)(mG)(mA)(mA)(mU)(mA)(mC)(mU)(fU)#(mG)#(fG)#(mC)#(mU)#(mU)#(mU)#(mU) | 227 |
| N_29292 | P(mU)#(fA)#(mA)(mC)(mA)(fU)(mG)(mA)(mA)(mU)(mA)(mC)(mU)(fU)#(mG)#(fG)#(mC)#(mU)#(mU)#(mU)#(mU) | 227 |
| N_29293 | P(mU)#(fA)#(mA)(mC)(mA)(fU)(mG)(mA)(mA)(mU)(mA)(mC)(mU)(fU)#(mG)#(fG)#(mC)#(mU)#(mU)#(mU)#(mU) | 227 |
| N_29303 | P(mU)#(fA)#(mA)(mC)(mA)(fU)(mG)(mA)(mA)(mU)(mA)(mC)(mU)(fU)#(mG)#(fG)#(mC)#(mU)#(mU)#(mU)#(mU) | 227 |
| N_29307 | P(mU)#(fA)#(mA)(mC)(mA)(fU)(mG)(mA)(mA)(mU)(mA)(mC)(mU)(fU)#(mG)#(fG)#(mC)#(mU)#(mU)#(mU)#(mU) | 227 |
| N_29328 | P(mU)#(fA)#(mA)(mC)(mA)(fU)(mG)(mA)(mA)(mU)(mA)(mC)(mU)(fU)#(mG)#(fG)#(mC)#(mU)#(mU)#(mU)#(mU) | 227 |
| N_29464 | P(mU)#(fA)#(mA)(mC)(mA)(fU)(mG)(mA)(mA)(mU)(mA)(mC)(mU)(fU)#(mG)#(fG)#(mC)#(mU)#(mU)#(mU)#(mU) | 227 |

TABLE 6C
Modified sense strand - 16 nucleotides in length

| Sequence | | SEQ ID |
|---|---|---|
| ID | Modified sense strand 16 nt | NO: |
| orf1ab_14080 | (mA)#(mU)#(mC)(mA)(fU)(fA)(fC)(mC)(fA)(mG)(mU)(mU)(mA)#(mC)#(mA)-TegChol | 228 |
| orf1ab_14361 | (mG)#(mU)#(mU)(mU)(mG)(fC)(fA)(fC)(mA)(fA)(mU)(mG)(mC)(mA)#(mG)#(mA)-TegChol | 229 |
| orf1ab_14830 | (mU)#(mU)#(mU)(mG)(fC)(fA)(fC)(mA)(fA)(mU)(mG)(mC)(mA)#(mG)#(mA)-TegChol | 230 |
| orf1ab_15376 | (mG)#(mU)#(mG)(mU)(fG)(fA)(fC)(mA)(fA)(mG)(mC)(mU)(mA)#(mC)#(mA)-TegChol | 231 |
| orf1ab_15786 | (mU)#(mA)#(mA)(mA)(fG)(fA)(fA)(mC)(fU)(mG)(mA)(mC)(mU)#(mU)#(mA)-TegChol | 232 |
| orf1ab_17107 | (mU)#(mA)#(mG)(mG)(fC)(fC)(fA)(mA)(fU)(mA)(mG)(mC)(mA)#(mA)#(mA)-TegChol | 233 |
| orf1ab_17370 | (mU)#(mC)#(mA)(mU)(fA)(fA)(fU)(mU)(fU)(mG)(mU)(mG)(mG)#(mC)#(mA)-TegChol | 234 |
| orf1ab_18025 | (mU)#(mU)#(mG)(mU)(fA)(fA)(fA)(mG)(fU)(mU)(mG)(mC)(mC)#(mA)#(mA)-TegChol | 235 |
| orf1ab_18571 | (mU)#(mA)#(mC)(mG)(fA)(fC)(fU)(mC)(fU)(mG)(mU)(mC)(mA)#(mG)#(mA)-TegChol | 236 |
| orf1ab_20497 | (mU)#(mA)#(mA)(mA)(fU)(fC)(fA)(mA)(fU)(mA)(mA)(mC)(mA)#(mG)#(mA)-TegChol | 237 |
| orf1ab_20892 | (mG)#(mC)#(mU)(mG)(fU)(fA)(fC)(mC)(fU)(mG)(mG)(mU)(mG)#(mC)#(mA)-TegChol | 238 |
| orf1ab_21391 | (mU)#(mU)#(mU)(mA)(fC)(fU)(fC)(mA)(fU)(mG)(mU)(mC)(mA)#(mA)#(mA)-TegChol | 239 |
| orf1a_416 | (mU)#(mU)#(mC)(mU)(fA)(fC)(fU)(mA)(fA)(mG)(mC)(mC)(mA)#(mC)#(mA)-TegChol | 240 |
| orf1a_2290 | (mU)#(mU)#(mA)(mA)(fA)(fG)(fA)(mA)(fU)(mG)(mU)(mC)(mU)#(mG)#(mA)-TegChol | 241 |
| orf1a_6059 | (mU)#(mU)#(mU)(mG)(fA)(fU)(fA)(mU)(fU)(mA)(mU)(mC)(mA)#(mC)#(mA)-TegChol | 242 |
| orf1a_6322 | (mG)#(mA)#(mA)(mU)(fU)(fU)(fG)(mA)(fU)(mG)(mU)(mU)(mU)#(mC)#(mA)-TegChol | 243 |
| orf1a_6499 | (mC)#(mU)#(mA)(mU)(fU)(fA)(fU)(mU)(fU)(mG)(mC)(mU)(mG)#(mG)#(mA)-TegChol | 244 |
| orf1a_7643 | (mA)#(mA)#(mA)(mU)(fG)(fU)(fA)(mC)(fU)(mA)(mC)(mC)(mA)#(mG)#(mA)-TegChol | 245 |
| orf1a_8200 | (mU)#(mC)#(mU)(mU)(fU)(fA)(fG)(mU)(fU)(mU)(mC)(mU)(mA)#(mC)#(mA)-TegChol | 246 |
| orf1a_8201 | (mA)#(mU)#(mC)(mU)(fU)(fU)(fA)(mG)(fU)(mU)(mU)(mC)(mU)#(mA)#(mA)-TegChol | 247 |
| orf1a_8744 | (mA)#(mU)#(mG)(mU)(fU)(fU)(fG)(mU)(fU)(mA)(mG)(mC)(mA)#(mA)#(mA)-TegChol | 248 |
| orf1a_9679 | (mG)#(mC)#(mA)(mA)(fU)(fU)(fG)(mU)(fU)(mA)(mU)(mC)(mC)#(mA)#(mA)-TegChol | 249 |
| orf1a_11594 | (mU)#(mA)#(mG)(mC)(fA)(fU)(fU)(mA)(fU)(mA)(mC)(mA)(mC)#(mU)#(mA)-TegChol | 250 |
| orf1a_12932 | (mA)#(mU)#(mA)(mC)(fU)(fU)(fC)(mA)(fC)(mU)(mU)(mU)(mA)#(mG)#(mA)-TegChol | 251 |
| S_21944 | (mU)#(mU)#(mC)(mA)(fC)(fA)(fG)(mA)(fC)(mU)(mU)(mU)(mA)#(mA)#(mA)-TegChol | 252 |
| S_22223 | (mU)#(mG)#(mG)(mU)(fU)(fC)(fU)(mA)(fA)(mA)(mG)(mC)(mC)#(mG)#(mA)-TegChol | 253 |
| S_22550 | (mG)#(mU)#(mU)(mU)(fG)(fU)(fA)(mA)(fU)(mA)(mU)(mU)(mA)#(mG)#(mA)-TegChol | 254 |
| S_22820 | (mU)#(mU)#(mU)(mA)(fU)(fA)(fA)(mU)(fU)(mA)(mU)(mA)(mA)#(mU)#(mA)-TegChol | 255 |
| S_22898 | (mA)#(mU)#(mU)(mA)(fU)(fA)(fA)(mU)(fU)(mA)(mC)(mC)(mA)#(mC)#(mA)-TegChol | 256 |
| S_23174 | (mG)#(mU)#(mU)(mG)(fA)(fA)(fA)(mU)(fU)(mG)(mA)(mC)(mA)#(mC)#(mA)-TegChol | 257 |
| S_23239 | (mU)#(mG)#(mU)(mU)(fG)(fG)(fA)(mA)(fA)(mG)(mG)(mC)(mA)#(mG)#(mA)-TegChol | 258 |
| S_23240 | (mU)#(mU)#(mG)(mU)(fU)(fG)(fG)(mA)(fA)(mA)(mG)(mG)(mC)#(mA)#(mA)-TegChol | 259 |
| S_23774 | (mA)#(mA)#(mU)(mG)(fU)(fA)(fC)(mA)(fU)(mU)(mG)(mU)(mA)#(mC)#(mA)-TegChol | 260 |
| S_24056 | (mU)#(mU)#(mG)(mU)(fU)(fU)(fG)(mA)(fU)(mG)(mA)(mA)(mG)#(mC)#(mA)-TegChol | 261 |
| S_24289 | (mU)#(mU)#(mC)(mU)(fG)(fU)(fG)(mU)(fA)(mA)(mC)(mU)(mC)#(mC)#(mA)-TegChol | 262 |
| S_25375 | (mU)#(mU)#(mC)(mG)(fU)(fU)(fU)(mA)(fU)(mG)(mU)(mG)(mU)#(mA)#(mA)-TegChol | 263 |
| 3a_25413 | (mG)#(mU)#(mU)(mC)(fC)(fA)(fA)(mU)(fU)(mG)(mU)(mG)(mA)#(mA)#(mA)-TegChol | 264 |
| 3a_25630 | (mC)#(mA)#(mG)(mC)(fA)(fA)(fG)(mU)(fU)(mG)(mC)(mA)(mA)#(mA)#(mA)-TegChol | 265 |
| 3a_25717 | (mG)#(mU)#(mA)(mG)(fA)(fC)(fU)(mA)(fA)(mA)(mG)(mC)(mA)#(mU)#(mA)-TegChol | 266 |
| 3a_25734 | (mU)#(mU)#(mU)(mA)(fU)(fA)(fC)(mU)(fC)(mU)(mG)(mC)(mA)#(mA)#(mA)-TegChol | 267 |
| 3a_25736 | (mA)#(mG)#(mU)(mU)(fU)(fA)(fU)(mA)(fC)(mU)(mC)(mU)(mG)#(mC)#(mA)-TegChol | 268 |
| 3a_25745 | (mU)#(mU)#(mC)(mU)(fU)(fA)(fC)(mA)(fA)(mA)(mG)(mU)(mU)#(mU)#(mA)-TegChol | 269 |
| 3a_25868 | (mU)#(mU)#(mA)(mC)(fA)(fC)(fU)(mA)(fU)(mU)(mG)(mU)(mA)#(mA)#(mA)-TegChol | 270 |
| 3a_25870 | (mA)#(mG)#(mU)(mU)(fA)(fC)(fA)(mC)(fU)(mA)(mU)(mU)(mG)#(mU)#(mA)-TegChol | 271 |
| 3a_25914 | (mA)#(mU)#(mA)(mG)(fG)(fA)(fC)(mU)(fU)(mG)(mU)(mU)(mG)#(mU)#(mA)-TegChol | 272 |
| 3a_25992 | (mC)#(mU)#(mG)(mU)(fG)(fU)(fA)(mA)(fU)(mA)(mC)(mA)(mA)#(mC)#(mA)-TegChol | 273 |
| 3a_26018 | (mG)#(mC)#(mU)(mG)(fG)(fU)(fA)(mA)(fU)(mA)(mG)(mU)(mC)#(mU)#(mA)-TegChol | 274 |
| 3a_26066 | (mA)#(mG)#(mG)(mU)(fA)(fA)(fC)(mA)(fU)(mG)(mU)(mU)(mC)#(mA)#(mA)-TegChol | 275 |
| E_26258 | (mC)#(mU)#(mG)(mU)(fC)(fU)(fC)(mU)(fU)(mC)(mC)(mG)(mA)#(mA)#(mA)-TegChol | 276 |
| E_26261 | (mU)#(mA)#(mC)(mC)(fU)(fG)(fU)(mC)(fU)(mC)(mU)(mU)(mC)#(mC)#(mA)-TegChol | 277 |
| E_26269 | (mU)#(mA)#(mU)(mU)(fA)(fA)(fC)(mG)(fU)(mA)(mC)(mC)(mU)#(mG)#(mA)-TegChol | 278 |
| E_26277 | (mC)#(mU)#(mA)(mU)(fU)(fA)(fA)(mC)(fU)(mA)(mU)(mU)(mA)#(mA)#(mA)-TegChol | 279 |
| E_26305 | (mU)#(mA)#(mC)(mC)(fA)(fC)(fG)(mA)(fA)(mA)(mG)(mC)(mA)#(mA)#(mA)-TegChol | 280 |
| E_26313 | (mA)#(mG)#(mC)(mA)(fA)(fG)(fA)(mA)(fU)(mA)(mC)(mC)(mA)#(mC)#(mA)-TegChol | 281 |
| E_26369 | (mC)#(mA)#(mA)(mU)(fA)(fU)(fU)(mG)(fC)(mA)(mG)(mC)(mA)#(mG)#(mA)-TegChol | 282 |
| E_26374 | (mG)#(mU)#(mU)(mA)(fA)(fC)(fA)(mA)(fU)(mA)(mU)(mU)(mG)#(mC)#(mA)-TegChol | 283 |
| E_26455 | (mG)#(mA)#(mC)(mC)(fA)(fG)(fA)(mA)(fG)(mA)(mU)(mC)(mA)#(mG)#(mA)-TegChol | 284 |
| E_26463 | (mU)#(mU)#(mC)(mG)(fU)(fU)(fU)(mA)(fG)(mA)(mC)(mC)(mA)#(mG)#(mA)-TegChol | 285 |
| E_26467 | (mU)#(mU)#(mA)(mG)(fU)(fU)(fC)(mG)(fU)(mU)(mU)(mA)(mG)#(mA)#(mA)-TegChol | 286 |
| E_26470 | (mU)#(mA)#(mU)(mU)(fU)(fA)(fG)(mU)(fU)(mC)(mG)(mU)(mU)#(mU)#(mA)-TegChol | 287 |
| M_26573 | (mA)#(mG)#(mG)(mU)(fU)(fC)(fC)(mA)(fU)(mU)(mG)(mU)(mU)#(mC)#(mA)-TegChol | 288 |
| M_26581 | (mC)#(mU)#(mA)(mU)(fU)(fA)(fC)(mU)(fA)(mG)(mG)(mU)(mU)#(mC)#(mA)-TegChol | 289 |
| M_26602 | (mU)#(mC)#(mC)(mA)(fU)(fG)(fU)(mA)(fA)(mG)(mG)(mA)(mA)#(mU)#(mA)-TegChol | 290 |
| M_26624 | (mU)#(mA)#(mG)(mG)(fC)(fA)(fA)(mA)(fU)(mU)(mG)(mU)(mA)#(mG)#(mA)-TegChol | 291 |
| M_26637 | (mA)#(mU)#(mU)(mC)(fC)(fU)(fG)(mU)(fU)(mG)(mG)(mC)(mA)#(mU)#(mA)-TegChol | 292 |
| M_26638 | (mU)#(mA)#(mU)(mU)(fC)(fC)(fU)(mG)(fU)(mU)(mG)(mG)(mC)#(mA)#(mA)-TegChol | 293 |
| M_26693 | (mA)#(mA)#(mA)(mG)(fU)(fU)(fA)(mC)(fU)(mG)(mG)(mC)(mC)#(mA)#(mA)-TegChol | 294 |
| M_26717 | (mA)#(mC)#(mA)(mG)(fC)(fA)(fG)(mC)(fA)(mA)(mG)(mC)(mA)#(mC)#(mA)-TegChol | 295 |
| M_27014 | (mG)#(mU)#(mG)(mA)(fU)(fU)(fU)(mC)(fU)(mU)(mU)(mA)(mG)#(mG)#(mA)-TegChol | 296 |
| M_27032 | (mG)#(mU)#(mU)(mC)(fG)(fU)(fG)(mA)(fU)(mG)(mU)(mA)(mG)#(mC)#(mA)-TegChol | 297 |
| M_27035 | (mA)#(mG)#(mC)(mG)(fU)(fU)(fC)(mG)(fU)(mG)(mA)(mU)(mG)#(mU)#(mA)-TegChol | 298 |
| M_27123 | (mU)#(mU)#(mU)(mA)(fU)(fA)(fG)(mU)(fU)(mG)(mC)(mC)(mA)#(mA)#(mA)-TegChol | 299 |
| 7a_27455 | (mC)#(mU)#(mC)(mU)(fA)(fA)(fC)(mA)(fC)(mA)(mC)(mU)(mC)#(mU)#(mA)-TegChol | 300 |
| 7a_27522 | (mG)#(mG)#(mA)(mU)(fG)(fA)(fA)(mA)(fU)(mG)(mG)(mU)(mG)#(mA)#(mA)-TegChol | 301 |
| 7a_27537 | (mU)#(mU)#(mG)(mU)(fU)(fA)(fU)(mC)(fA)(mG)(mC)(mU)(mA)#(mG)#(mA)-TegChol | 302 |
| 7a_27553 | (mG)#(mC)#(mA)(mA)(fG)(fU)(fC)(mA)(fG)(mU)(mG)(mC)(mA)#(mA)#(mA)-TegChol | 303 |
| 7a_27565 | (mU)#(mU)#(mG)(mA)(fG)(fU)(fG)(mC)(fU)(mA)(mA)(mA)(mG)#(mC)#(mA)-TegChol | 304 |
| 7a_27633 | (mU)#(mU)#(mA)(mG)(fG)(fU)(fG)(mA)(fA)(mA)(mC)(mU)(mG)#(mA)#(mA)-TegChol | 305 |
| 7a_27656 | (mC)#(mU)#(mU)(mC)(fC)(fU)(fC)(mU)(fU)(mG)(mU)(mC)(mU)#(mG)#(mA)-TegChol | 306 |
| 7a_27671 | (mA)#(mG)#(mU)(mA)(fA)(fA)(fG)(mU)(fU)(mC)(mU)(mU)(mG)#(mA)#(mA)-TegChol | 307 |
| 7a_27705 | (mA)#(mA)#(mC)(mA)(fC)(fU)(fA)(mU)(fU)(mG)(mC)(mC)(mG)#(mC)#(mA)-TegChol | 308 |
| 7a_27715 | (mA)#(mA)#(mG)(mU)(fG)(fU)(fU)(mA)(fU)(mA)(mA)(mA)(mC)#(mA)#(mA)-TegChol | 309 |
| 7a_27720 | (mA)#(mA)#(mG)(mC)(fA)(fA)(fA)(mG)(fU)(mG)(mU)(mU)(mA)#(mU)#(mA)-TegChol | 310 |
| 7a_27751 | (mG)#(mU)#(mU)(mC)(fA)(fA)(fU)(mC)(fA)(mU)(mU)(mC)(mU)#(mG)#(mA)-TegChol | 311 |
| 8b_27932 | (mU)#(mG)#(mG)(mU)(fG)(fA)(fA)(mA)(fU)(mG)(mC)(mA)(mG)#(mC)#(mA)-TegChol | 312 |
| 8b_27940 | (mU)#(mA)#(mC)(mA)(fU)(fU)(fC)(mU)(fU)(mG)(mG)(mU)(mG)#(mA)#(mA)-TegChol | 313 |
| 8b_27986 | (mG)#(mG)#(mG)(mU)(fC)(fA)(fU)(mC)(fA)(mA)(mC)(mU)(mA)#(mC)#(mA)-TegChol | 314 |
| 8b_28002 | (mG)#(mA)#(mA)(mG)(fU)(fG)(fA)(mA)(fU)(mA)(mG)(mG)(mA)#(mC)#(mA)-TegChol | 315 |
| 8b_28024 | (mC)#(mU)#(mC)(mU)(fA)(fA)(fU)(mA)(fU)(mA)(mC)(mC)(mA)#(mU)#(mA)-TegChol | 316 |
| 8b_28091 | (mA)#(mU)#(mG)(mG)(fG)(fU)(fG)(mA)(fU)(mU)(mU)(mA)(mG)#(mA)#(mA)-TegChol | 317 |
| orf1ab_15376 | (mA)#(mC)#(mG)(mG)(mU)(mG)(mU)(mG)(mA)(mC)(mA)(mA)(mG)(mC)(mU)(mA)#(mC)#(mA) | 339 |
| orf1ab_15786 | (mU)#(mA)#(mA)(mU)(mA)(mA)(mA)(mG)(mA)(mA)(mC)(mU)(mG)(mA)(mC)(mU)#(mU)#(mA) | 340 |
| orf1ab_17107 | (mA)#(mG)#(mC)(mU)(mA)(mG)(mG)(mC)(mC)(mA)(mA)(mU)(mA)(mG)(mC)(mA)#(mA)#(mA) | 341 |
| orf1ab_17370 | (mA)#(mA)#(mA)(mU)(mC)(mA)(mU)(mA)(mA)(mU)(mU)(mU)(mG)(mU)(mG)(mG)#(mC)#(mA) | 342 |
| orf1ab_18025 | (mA)#(mG)#(mC)(mU)(mU)(mG)(mU)(mA)(mA)(mA)(mG)(mU)(mU)(mG)(mC)(mC)#(mA)#(mA) | 343 |
| orf1ab_18571 | (mA)#(mA)#(mA)(mU)(mA)(mC)(mG)(mA)(mC)(mU)(mC)(mU)(mG)(mU)(mC)(mA)#(mG)#(mA) | 344 |
| orf1ab_20497 | (mU)#(mA)#(mA)(mU)(mA)(mA)(mA)(mU)(mC)(mA)(mA)(mU)(mA)(mA)(mC)(mA)#(mG)#(mA) | 345 |
| orf1ab_20892 | (mA)#(mC)#(mA)(mG)(mC)(mU)(mG)(mU)(mA)(mC)(mC)(mU)(mG)(mG)(mU)(mG)#(mC)#(mA) | 346 |
| orf1ab_21391 | (mA)#(mA)#(mA)(mU)(mU)(mU)(mA)(mC)(mU)(mC)(mA)(mU)(mG)(mU)(mC)(mA)#(mA)#(mA) | 347 |
| orf1a_416 | (mA)#(mA)#(mC)(mU)(mU)(mC)(mU)(mA)(mC)(mU)(mA)(mA)(mG)(mC)(mC)(mA)#(mC)#(mA) | 348 |
| orf1a_2290 | (mA)#(mG)#(mC)(mU)(mU)(mA)(mA)(mA)(mG)(mA)(mA)(mU)(mG)(mU)(mC)(mU)#(mG)#(mA) | 349 |
| orf1a_6059 | (mA)#(mA)#(mA)(mU)(mU)(mU)(mG)(mA)(mU)(mA)(mU)(mU)(mA)(mU)(mC)(mA)#(mC)#(mA) | 350 |
| orf1a_6322 | (mA)#(mA)#(mC)(mG)(mA)(mA)(mU)(mU)(mU)(mG)(mA)(mU)(mG)(mU)(mU)(mU)#(mC)#(mA) | 351 |
| orf1a_6499 | (mA)#(mA)#(mA)(mC)(mU)(mA)(mU)(mU)(mA)(mU)(mU)(mU)(mG)(mC)(mU)(mG)#(mG)#(mA) | 352 |
| orf1a_7643 | (mA)#(mA)#(mU)(mA)(mA)(mA)(mU)(mG)(mU)(mA)(mC)(mU)(mA)(mC)(mC)(mA)#(mG)#(mA) | 353 |
| orf1a_8200 | (mA)#(mC)#(mA)(mU)(mC)(mU)(mU)(mU)(mA)(mG)(mU)(mU)(mU)(mC)(mU)(mA)#(mC)#(mA) | 354 |
| orf1a_8201 | (mA)#(mA)#(mC)(mA)(mU)(mC)(mU)(mU)(mU)(mA)(mG)(mU)(mU)(mU)(mC)(mU)#(mA)#(mA) | 355 |
| orf1a_8744 | (mA)#(mG)#(mC)(mA)(mU)(mG)(mU)(mU)(mU)(mG)(mU)(mU)(mA)(mG)(mC)(mA)#(mA)#(mA) | 356 |
| orf1a_9679 | (mU)#(mA)#(mA)(mG)(mC)(mA)(mA)(mU)(mU)(mG)(mU)(mU)(mA)(mU)(mC)(mC)#(mA)#(mA) | 357 |
| orf1a_11594 | (mA)#(mA)#(mC)(mU)(mA)(mG)(mC)(mA)(mU)(mU)(mA)(mU)(mA)(mC)(mA)(mC)#(mU)#(mA) | 358 |
| orf1a_12932 | (mU)#(mA)#(mA)(mA)(mU)(mA)(mC)(mU)(mU)(mC)(mA)(mC)(mU)(mU)(mU)(mA)#(mG)#(mA) | 359 |
| S_21944 | (mA)#(mA)#(mA)(mU)(mU)(mC)(mA)(mC)(mA)(mG)(mA)(mC)(mU)(mU)(mU)(mA)#(mA)#(mA) | 360 |
| S_22223 | (mC)#(mA)#(mA)(mU)(mG)(mG)(mU)(mU)(mC)(mU)(mA)(mA)(mA)(mG)(mC)(mC)#(mG)#(mA) | 361 |
| S_22550 | (mC)#(mA)#(mA)(mG)(mU)(mU)(mU)(mG)(mU)(mA)(mA)(mU)(mA)(mU)(mU)(mA)#(mG)#(mA) | 362 |
| S_22820 | (mU)#(mA)#(mA)(mU)(mU)(mU)(mA)(mU)(mA)(mA)(mU)(mU)(mA)(mU)(mA)(mA)#(mU)#(mA) | 363 |
| S_22898 | (mG)#(mU)#(mA)(mA)(mU)(mU)(mA)(mU)(mA)(mA)(mU)(mU)(mA)(mC)(mC)(mA)#(mC)#(mA) | 364 |
| S_23174 | (mG)#(mA)#(mA)(mG)(mU)(mU)(mG)(mA)(mA)(mA)(mU)(mU)(mG)(mA)(mC)(mA)#(mC)#(mA) | 365 |
| S_23239 | (mA)#(mA)#(mU)(mU)(mG)(mU)(mU)(mG)(mG)(mA)(mA)(mA)(mG)(mG)(mC)(mA)#(mG)#(mA) | 366 |
| S_23240 | (mA)#(mA)#(mA)(mU)(mU)(mG)(mU)(mU)(mG)(mG)(mA)(mA)(mA)(mG)(mG)(mC)#(mA)#(mA) | 367 |
| S_23774 | (mA)#(mC)#(mA)(mA)(mA)(mU)(mG)(mU)(mA)(mC)(mA)(mU)(mU)(mG)(mU)(mA)#(mC)#(mA) | 368 |
| S_24056 | (mA)#(mU)#(mA)(mU)(mU)(mG)(mU)(mU)(mU)(mG)(mA)(mU)(mG)(mA)(mA)(mG)#(mC)#(mA) | 369 |
| S_24289 | (mA)#(mC)#(mA)(mU)(mU)(mC)(mU)(mG)(mU)(mG)(mU)(mA)(mA)(mC)(mU)(mC)#(mC)#(mA) | 370 |
| S_25375 | (mA)#(mA)#(mG)(mU)(mU)(mC)(mG)(mU)(mU)(mU)(mA)(mU)(mG)(mU)(mG)(mU)#(mA)#(mA) | 371 |
| 3a_25413 | (mA)#(mC)#(mA)(mG)(mU)(mU)(mC)(mC)(mA)(mA)(mU)(mU)(mG)(mU)(mG)(mA)#(mA)#(mA) | 372 |
| 3a_25630 | (mC)#(mA)#(mA)(mC)(mA)(mG)(mC)(mA)(mA)(mG)(mU)(mU)(mG)(mC)(mA)(mA)#(mA)#(mA) | 373 |
| 3a_25717 | (mG)#(mA)#(mA)(mG)(mU)(mA)(mG)(mA)(mC)(mU)(mA)(mA)(mA)(mG)(mC)(mA)#(mU)#(mA) | 374 |
| 3a_25734 | (mA)#(mA)#(mG)(mU)(mU)(mU)(mA)(mU)(mA)(mC)(mU)(mC)(mU)(mG)(mC)(mA)#(mA)#(mA) | 375 |
| 3a_25736 | (mC)#(mA)#(mA)(mA)(mG)(mU)(mU)(mU)(mA)(mU)(mA)(mC)(mU)(mC)(mU)(mG)#(mC)#(mA) | 376 |
| 3a_25745 | (mU)#(mU)#(mA)(mU)(mU)(mC)(mU)(mU)(mA)(mC)(mA)(mA)(mA)(mG)(mU)(mU)#(mU)#(mA) | 377 |
| 3a_25868 | (mA)#(mA)#(mG)(mU)(mU)(mA)(mC)(mA)(mC)(mU)(mA)(mU)(mU)(mG)(mU)(mA)#(mA)#(mA) | 378 |
| 3a_25870 | (mA)#(mG)#(mA)(mA)(mG)(mU)(mU)(mA)(mC)(mA)(mC)(mU)(mA)(mU)(mU)(mG)#(mU)#(mA) | 379 |
| 3a_25914 | (mG)#(mA)#(mA)(mA)(mU)(mA)(mG)(mG)(mA)(mC)(mU)(mU)(mG)(mU)(mU)(mG)#(mU)#(mA) | 380 |
| 3a_25992 | (mU)#(mA)#(mA)(mC)(mU)(mG)(mU)(mG)(mU)(mA)(mA)(mU)(mA)(mC)(mA)(mA)#(mC)#(mA) | 381 |
| 3a_26018 | (mA)#(mC)#(mA)(mG)(mC)(mU)(mG)(mG)(mU)(mA)(mA)(mU)(mA)(mG)(mU)(mC)#(mU)#(mA) | 382 |
| 3a_26066 | (mA)#(mG)#(mA)(mA)(mG)(mG)(mU)(mA)(mA)(mC)(mA)(mU)(mG)(mU)(mU)(mC)#(mA)#(mA) | 383 |
| E_26258 | (mU)#(mA)#(mC)(mC)(mU)(mG)(mU)(mC)(mU)(mC)(mU)(mU)(mC)(mC)(mG)(mA)#(mA)#(mA) | 384 |
| E_26261 | (mA)#(mC)#(mG)(mU)(mA)(mC)(mC)(mU)(mG)(mU)(mC)(mU)(mC)(mU)(mU)(mC)#(mC)#(mA) | 385 |
| E_26269 | (mA)#(mA)#(mC)(mU)(mA)(mU)(mU)(mA)(mA)(mC)(mG)(mU)(mA)(mC)(mC)(mU)#(mG)#(mA) | 386 |
| E_26277 | (mA)#(mC)#(mG)(mC)(mU)(mA)(mU)(mU)(mA)(mA)(mC)(mU)(mA)(mU)(mU)(mA)#(mA)#(mA) | 387 |
| E_26305 | (mG)#(mA)#(mA)(mU)(mA)(mC)(mC)(mA)(mC)(mG)(mA)(mA)(mA)(mG)(mC)(mA)#(mA)#(mA) | 388 |
| E_26313 | (mA)#(mC)#(mU)(mA)(mG)(mC)(mA)(mA)(mG)(mA)(mA)(mU)(mA)(mC)(mC)(mA)#(mC)#(mA) | 389 |
| E_26369 | (mU)#(mA)#(mA)(mC)(mA)(mA)(mU)(mA)(mU)(mU)(mG)(mC)(mA)(mG)(mC)(mA)#(mG)#(mA) | 390 |
| E_26374 | (mC)#(mA)#(mC)(mG)(mU)(mU)(mA)(mA)(mC)(mA)(mA)(mU)(mA)(mU)(mU)(mG)#(mC)#(mA) | 391 |
| E_26455 | (mU)#(mU)#(mA)(mG)(mA)(mC)(mC)(mA)(mG)(mA)(mA)(mG)(mA)(mU)(mC)(mA)#(mG)#(mA) | 392 |
| E_26463 | (mU)#(mA)#(mG)(mU)(mU)(mC)(mG)(mU)(mU)(mU)(mA)(mG)(mA)(mC)(mC)(mA)#(mG)#(mA) | 393 |
| E_26467 | (mU)#(mA)#(mU)(mU)(mU)(mA)(mG)(mU)(mU)(mC)(mG)(mU)(mU)(mU)(mA)(mG)#(mA)#(mA) | 394 |
| E_26470 | (mU)#(mA)#(mA)(mU)(mA)(mU)(mU)(mU)(mA)(mG)(mU)(mU)(mC)(mG)(mU)(mU)#(mU)#(mA) | 395 |
| M_26573 | (mA)#(mC)#(mU)(mA)(mG)(mG)(mU)(mU)(mC)(mC)(mA)(mU)(mU)(mG)(mU)(mU)#(mC)#(mA) | 396 |
| M_26581 | (mA)#(mA)#(mC)(mC)(mU)(mA)(mU)(mU)(mA)(mC)(mU)(mA)(mG)(mG)(mU)(mU)#(mC)#(mA) | 397 |
| M_26602 | (mA)#(mA)#(mA)(mU)(mC)(mC)(mA)(mU)(mG)(mU)(mA)(mA)(mG)(mG)(mA)(mA)#(mU)#(mA) | 398 |
| M_26624 | (mG)#(mC)#(mA)(mU)(mA)(mG)(mG)(mC)(mA)(mA)(mA)(mU)(mU)(mG)(mU)(mA)#(mG)#(mA) | 399 |
| M_26637 | (mC)#(mC)#(mU)(mA)(mU)(mU)(mC)(mC)(mU)(mG)(mU)(mU)(mG)(mG)(mC)(mA)#(mU)#(mA) | 400 |
| M_26638 | (mA)#(mC)#(mC)(mU)(mA)(mU)(mU)(mC)(mC)(mU)(mG)(mU)(mU)(mG)(mG)(mC)#(mA)#(mA) | 401 |
| M_26693 | (mG)#(mC)#(mU)(mA)(mA)(mA)(mG)(mU)(mU)(mA)(mC)(mU)(mG)(mG)(mC)(mC)#(mA)#(mA) | 402 |
| M_26717 | (mU)#(mA)#(mA)(mA)(mC)(mA)(mG)(mC)(mA)(mG)(mC)(mA)(mA)(mG)(mC)(mA)#(mC)#(mA) | 403 |
| M_27014 | (mA)#(mC)#(mA)(mG)(mU)(mG)(mA)(mU)(mU)(mU)(mC)(mU)(mU)(mU)(mA)(mG)#(mG)#(mA) | 404 |
| M_27032 | (mA)#(mG)#(mC)(mG)(mU)(mU)(mC)(mG)(mU)(mG)(mA)(mU)(mG)(mU)(mA)(mG)#(mC)#(mA) | 405 |
| M_27035 | (mG)#(mA)#(mA)(mA)(mG)(mC)(mG)(mU)(mU)(mC)(mG)(mU)(mG)(mA)(mU)(mG)#(mU)#(mA) | 406 |
| M_27123 | (mU)#(mA)#(mA)(mU)(mU)(mU)(mA)(mU)(mA)(mG)(mU)(mU)(mG)(mC)(mC)(mA)#(mA)#(mA) | 407 |
| 7a_27455 | (mU)#(mA)#(mC)(mC)(mU)(mC)(mU)(mA)(mA)(mC)(mA)(mC)(mA)(mC)(mU)(mC)#(mU)#(mA) | 408 |
| 7a_27522 | (mA)#(mG)#(mA)(mG)(mG)(mA)(mU)(mG)(mA)(mA)(mA)(mU)(mG)(mG)(mU)(mG)#(mA)#(mA) | 409 |
| 7a_27537 | (mA)#(mA)#(mU)(mU)(mU)(mG)(mU)(mU)(mA)(mU)(mC)(mA)(mG)(mC)(mU)(mA)#(mG)#(mA) | 410 |
| 7a_27553 | (mA)#(mA)#(mA)(mG)(mC)(mA)(mA)(mG)(mU)(mC)(mA)(mG)(mU)(mG)(mC)(mA)#(mA)#(mA) | 411 |
| 7a_27565 | (mA)#(mA)#(mA)(mU)(mU)(mG)(mA)(mG)(mU)(mG)(mC)(mU)(mA)(mA)(mA)(mG)#(mC)#(mA) | 412 |
| 7a_27633 | (mA)#(mG)#(mU)(mU)(mU)(mA)(mG)(mG)(mU)(mG)(mA)(mA)(mA)(mC)(mU)(mG)#(mA)#(mA) | 413 |
| 7a_27656 | (mG)#(mA)#(mA)(mC)(mU)(mU)(mC)(mC)(mU)(mC)(mU)(mU)(mG)(mU)(mC)(mU)#(mG)#(mA) | 414 |
| 7a_27671 | (mG)#(mA)#(mG)(mA)(mG)(mU)(mA)(mA)(mA)(mG)(mU)(mU)(mC)(mU)(mU)(mG)#(mA)#(mA) | 415 |
| 7a_27705 | (mA)#(mU)#(mA)(mA)(mA)(mC)(mA)(mC)(mU)(mA)(mU)(mU)(mG)(mC)(mC)(mG)#(mC)#(mA) | 416 |
| 7a_27715 | (mG)#(mC)#(mA)(mA)(mA)(mG)(mU)(mG)(mU)(mU)(mA)(mU)(mA)(mA)(mA)(mC)#(mA)#(mA) | 417 |
| 7a_27720 | (mG)#(mU)#(mG)(mA)(mA)(mG)(mC)(mA)(mA)(mA)(mG)(mU)(mG)(mU)(mU)(mA)#(mU)#(mA) | 418 |
| 7a_27751 | (mA)#(mA)#(mA)(mG)(mU)(mU)(mC)(mA)(mA)(mU)(mC)(mA)(mU)(mU)(mC)(mU)#(mG)#(mA) | 419 |
| 8b_27932 | (mU)#(mC)#(mU)(mU)(mG)(mG)(mU)(mG)(mA)(mA)(mA)(mU)(mG)(mC)(mA)(mG)#(mC)#(mA) | 420 |
| 8b_27940 | (mA)#(mA)#(mC)(mU)(mA)(mC)(mA)(mU)(mU)(mC)(mU)(mU)(mG)(mG)(mU)(mG)#(mA)#(mA) | 421 |
| 8b_27986 | (mC)#(mA)#(mC)(mG)(mG)(mG)(mU)(mC)(mA)(mU)(mC)(mA)(mA)(mC)(mU)(mA)#(mC)#(mA) | 422 |
| 8b_28002 | (mA)#(mU)#(mA)(mG)(mA)(mA)(mG)(mU)(mG)(mA)(mA)(mU)(mA)(mG)(mG)(mA)#(mC)#(mA) | 423 |
| 8b_28024 | (mC)#(mU)#(mA)(mC)(mU)(mC)(mU)(mA)(mA)(mU)(mA)(mU)(mA)(mC)(mC)(mA)#(mU)#(mA) | 424 |
| 8b_28091 | (mU)#(mG)#(mA)(mA)(mU)(mG)(mG)(mG)(mU)(mG)(mA)(mU)(mU)(mU)(mA)(mG)#(mA)#(mA) | 425 |
| 8b_28119 | (mA)#(mA)#(mC)(mU)(mG)(mU)(mA)(mU)(mA)(mA)(mU)(mU)(mA)(mC)(mC)(mG)#(mA)#(mA) | 426 |
| 8b_28127 | (mA)#(mA)#(mA)(mC)(mA)(mG)(mG)(mA)(mA)(mA)(mC)(mU)(mG)(mU)(mA)(mU)#(mA)#(mA) | 427 |
| 8b_28128 | (mU)#(mA)#(mA)(mA)(mC)(mA)(mG)(mG)(mA)(mA)(mA)(mC)(mU)(mG)(mU)(mA)#(mU)#(mA) | 428 |
| 8b_28163 | (mC)#(mC)#(mC)(mA)(mA)(mU)(mU)(mU)(mA)(mG)(mG)(mU)(mU)(mC)(mC)(mU)#(mG)#(mA) | 429 |
| 8b_28218 | (mA)#(mA)#(mC)(mG)(mU)(mC)(mA)(mU)(mG)(mA)(mU)(mA)(mC)(mU)(mC)(mU)#(mA)#(mA) | 430 |
| 8b_28222 | (mC)#(mA)#(mC)(mG)(mA)(mA)(mC)(mG)(mU)(mC)(mA)(mU)(mG)(mA)(mU)(mA)#(mC)#(mA) | 431 |
| N_28407 | (mA)#(mC)#(mG)(mC)(mA)(mG)(mU)(mA)(mU)(mU)(mA)(mU)(mU)(mG)(mG)(mG)#(mU)#(mA) | 432 |
| N_28655 | (mA)#(mA)#(mC)(mC)(mC)(mA)(mU)(mA)(mU)(mG)(mA)(mU)(mG)(mC)(mC)(mG)#(mU)#(mA) | 433 |
| N_28945 | (mA)#(mG)#(mC)(mU)(mG)(mG)(mU)(mU)(mC)(mA)(mA)(mU)(mC)(mU)(mG)(mU)#(mC)#(mA) | 434 |
| N_28992 | (mC)#(mA)#(mG)(mU)(mU)(mU)(mG)(mG)(mC)(mC)(mU)(mU)(mG)(mU)(mU)(mG)#(mU)#(mA) | 435 |
| N_29141 | (mU)#(mC)#(mC)(mU)(mU)(mG)(mU)(mC)(mU)(mG)(mA)(mU)(mU)(mA)(mG)(mU)#(mU)#(mA) | 436 |
| N_29276 | (mA)#(mU)#(mC)(mC)(mA)(mA)(mU)(mU)(mU)(mG)(mA)(mU)(mG)(mG)(mC)(mA)#(mC)#(mA) | 437 |
| N_29292 | (mA)#(mA)#(mU)(mU)(mU)(mG)(mG)(mA)(mU)(mC)(mU)(mU)(mU)(mG)(mU)(mC)#(mA)#(mA) | 438 |
| N_29293 | (mA)#(mA)#(mA)(mU)(mU)(mU)(mG)(mG)(mA)(mU)(mC)(mU)(mU)(mU)(mG)(mU)#(mC)#(mA) | 439 |
| N_29303 | (mU)#(mU)#(mG)(mA)(mU)(mC)(mU)(mU)(mU)(mG)(mA)(mA)(mA)(mU)(mU)(mU)#(mG)#(mA) | 440 |
| N_29307 | (mU)#(mG)#(mA)(mC)(mU)(mU)(mG)(mA)(mU)(mC)(mU)(mU)(mU)(mG)(mA)(mA)#(mA)#(mA) | 441 |
| N_29328 | (mC)#(mA)#(mA)(mU)(mA)(mU)(mG)(mC)(mU)(mU)(mA)(mU)(mU)(mC)(mA)(mG)#(mC)#(mA) | 442 |
| N_29464 | (mA)#(mA)#(mA)(mU)(mC)(mA)(mU)(mC)(mC)(mA)(mA)(mA)(mU)(mC)(mU)(mG)#(mC)#(mA) | 443 |

TABLE 7
SARS-CoV2-Additional target sequences

| | | SEQ | | SEQ |
|---|---|---|---|---|
| | | ID | | ID |
| Sequence ID | 20 nt Sequence | NO: | 45 nt Gene Region | NO: |
| 3a_25688 | CUGGCCUUGAAGCC | 444 | TTTTGCTCGTTGCTGCT | 642 |
| | CCUUUU | | GGCCTTGAAGCCCCTT | |
| | | | TTCTCTATCTTT | |
| 3a_25570 | UCCAAAAUCAUAAC | 445 | GTTTTTCAGAGCGCTTC | 643 |
| | CCUCAA | | CAAAATCATAACCCTC | |
| | | | AAAAAGAGATGG | |
| 3a_25852 | UACGACUAUUGUA | 446 | TGGCATACTAATTGTT | 644 |
| | UACCUUA | | ACGACTATTGTATACC | |
| | | | TTACAATAGTGTA | |
| 3a_25518 | UUUCGGAUGGCUU | 447 | ACAAGCCTCACTCCCT | 645 |
| | AUUGUUG | | TTCGGATGGCTTATTGT | |
| | | | TGGCGTTGCACT | |
| 3a_25974 | AUCUGGAGUAAAA | 448 | TACTGAAAAATGGGAA | 646 |
| | GACUGUG | | TCTGGAGTAAAAGACT | |
| | | | GTGTTGTATTACA | |
| 3a_25835 | GCUGGCAUACUAA | 449 | CCAACTATTTTCTTTGC | 647 |
| | UUGUUAC | | TGGCATACTAATTGTT | |
| | | | ACGACTATTGTA | |
| 3a_25645 | UUGUUGUUUGUAA | 450 | GTTTGCAACTTGCTGTT | 648 |
| | CAGUUUA | | GTTGTTTGTAACAGTTT | |
| | | | ACTCACACCTT | |
| 3a_25773 | UUGGCUUUGCUGG | 451 | AATAATAATGAGGCTT | 649 |
| | AAAUGCC | | TGGCTTTGCTGGAAAT | |
| | | | GCCGTTCCAAAAA | |
| 3a_25921 | AGUCCUAUUUCUG | 452 | GGTGATGGCACAACAA | 650 |
| | AACAUGA | | GTCCTATTTCTGAACAT | |
| | | | GACTACCAGATT | |
| 3a_26114 | AAGAACAUGUCCA | 453 | TTGTTGATGAGCCTGA | 651 |
| | AAUUCAC | | AGAACATGTCCAAATT | |
| | | | CACACAATCGACG | |
| 3a_25750 | UUUGUAAGAAUAA | 454 | TTGCAGAGTATAAACT | 652 |
| | UAAUGAG | | TTGTAAGAATAATAAT | |
| | | | GAGGCTTTGGCTT | |
| 3a_25862 | GUAUACCUUACAA | 455 | ATTGTTACGACTATTGT | 653 |
| | UAGUGUA | | ATACCTTACAATAGTG | |
| | | | TAACTTCTTCAA | |
| 3a_25847 | AUUGUUACGACUA | 456 | TTTGCTGGCATACTAA | 654 |
| | UUGUAUA | | TTGTTACGACTATTGTA | |
| | | | TACCTTACAATA | |
| 3a_26105 | AUGAGCCUGAAGA | 457 | ACAATAAAATTGTTGA | 655 |
| | ACAUGUC | | TGAGCCTGAAGAACAT | |
| | | | GTCCAAATTCACA | |
| 3a_25863 | UAUACCUUACAAU | 458 | TTGTTACGACTATTGTA | 656 |
| | AGUGUAA | | TACCTTACAATAGTGT | |
| | | | AACTTCTTCAAT | |
| 3a_26164 | CCAGUAAUGGAACC | 459 | TCCGGAGTTGTTAATC | 657 |
| | AAUUUA | | CAGTAATGGAACCAAT | |
| | | | TTATGATGAACCG | |
| 3a_25706 | UUCUCUAUCUUUA | 460 | GCCTTGAAGCCCCTTTT | 658 |
| | UGCUUUA | | CTCTATCTTTATGCTTT | |
| | | | AGTCTACTTCT | |
| 3a_25595 | GAUGGCAACUAGC | 461 | TAACCCTCAAAAAGAG | 659 |
| | ACUCUCC | | ATGGCAACTAGCACTC | |
| | | | TCCAAGGGTGTTC | |
| 3a_25611 | CUCCAAGGGUGUUC | 462 | ATGGCAACTAGCACTC | 660 |
| | ACUUUG | | TCCAAGGGTGTTCACT | |
| | | | TTGTTTGCAACTT | |
| 3a_25405 | AUGAGAAUCUUCA | 463 | CTTATGGATTTGTTTAT | 661 |
| | CAAUUGG | | GAGAATCTTCACAATT | |
| | | | GGAACTGTAACT | |
| 3a_25535 | UUGGCGUUGCACU | 464 | TCGGATGGCTTATTGTT | 662 |
| | UCUUGCU | | GGCGTTGCACTTCTTG | |
| | | | CTGTTTTTCAGA | |
| 3a_25653 | UGUAACAGUUUAC | 465 | CTTGCTGTTGTTGTTTG | 663 |
| | UCACACC | | TAACAGTTTACTCACA | |
| | | | CCTTTTGCTCGT | |
| 7a_27598 | GACGGCGUAAAAC | 466 | GCTTTTGCTTGTCCTGA | 664 |
| | ACGUCUA | | CGGCGTAAAACACGTC | |
| | | | TATCAGTTACGT | |
| 7a_27483 | UUUAAAAGAACCU | 467 | AGGTACAACAGTACTT | 665 |
| | UGCUCUU | | TTAAAAGAACCTTGCT | |
| | | | CTTCTGGAACATA | |
| 7a_27258 | GAGGACUUUUAAA | 468 | ATTACTAATTATTATG | 666 |
| | GUUUCCA | | AGGACTTTTAAAGTTT | |
| | | | CCATTTGGAATCT | |
| 7a_27264 | UUUUAAAGUUUCC | 469 | AATTATTATGAGGACT | 667 |
| | AUUUGGA | | TTTAAAGTTTCCATTTG | |
| | | | GAATCTTGATTA | |
| 7a_27257 | UGAGGACUUUUAA | 470 | TATTACTAATTATTATG | 668 |
| | AGUUUCC | | AGGACTTTTAAAGTTT | |
| | | | CCATTTGGAATC | |
| 7a_27334 | ACUGAGAAUAAAU | 471 | TTATCTAAGTCACTAA | 669 |
| | AUUCUCA | | CTGAGAATAAATATTC | |
| | | | TCAATTAGATGAA | |
| 7a_27595 | CCUGACGGCGUAAA | 472 | TTTGCTTTTGCTTGTCC | 670 |
| | ACACGU | | TGACGGCGTAAAACAC | |
| | | | GTCTATCAGTTA | |
| 7a_27466 | AGAGGUACAACAG | 473 | TACCAAGAGTGTGTTA | 671 |
| | UACUUUU | | GAGGTACAACAGTACT | |
| | | | TTTAAAAGAACCT | |
| 7a_27237 | AGAGAUAUUACUA | 474 | TCAGGTTACTATAGCA | 672 |
| | AUUAUUA | | GAGATATTACTAATTA | |
| | | | TTATGAGGACTTT | |
| 7a_27395 | UGAAAAUUAUUCU | 475 | TTGATTAAACGAACAT | 673 |
| | UUUCUUG | | GAAAATTATTCTTTTCT | |
| | | | TGGCACTGATAA | |
| 7a_27289 | GAUUACAUCAUAA | 476 | TCCATTTGGAATCTTG | 674 |
| | ACCUCAU | | ATTACATCATAAACCT | |
| | | | CATAATTAAAAAT | |
| 7a_27243 | AUUACUAAUUAUU | 477 | TACTATAGCAGAGATA | 675 |
| | AUGAGGA | | TTACTAATTATTATGA | |
| | | | GGACTTTTAAAGT | |
| 7a_27319 | UUAUCUAAGUCAC | 478 | CTCATAATTAAAAATT | 676 |
| | UAACUGA | | TATCTAAGTCACTAAC | |
| | | | TGAGAATAAATAT | |
| 7a_27226 | GUUACUAUAGCAG | 479 | CTCGTTGACTTTCAGGT | 677 |
| | AGAUAUU | | TACTATAGCAGAGATA | |
| | | | TTACTAATTATT | |
| 7a_27256 | AUGAGGACUUUUA | 480 | ATATTACTAATTATTAT | 678 |
| | AAGUUUC | | GAGGACTTTTAAAGTT | |
| | | | TCCATTTGGAAT | |
| 7a_27203 | UGUUUCAUCUCGU | 481 | GTAAGTGACAACAGAT | 679 |
| | UGACUUU | | GTTTCATCTCGTTGACT | |
| | | | TTCAGGTTACTA | |
| 7a_27292 | UACAUCAUAAACCU | 482 | ATTTGGAATCTTGATT | 680 |
| | CAUAAU | | ACATCATAAACCTCAT | |
| | | | AATTAAAAATTTA | |
| 7a_27333 | AACUGAGAAUAAA | 483 | TTTATCTAAGTCACTA | 681 |
| | UAUUCUC | | ACTGAGAATAAATATT | |
| | | | CTCAATTAGATGA | |
| 7a_27255 | UAUGAGGACUUUU | 484 | GATATTACTAATTATT | 682 |
| | AAAGUUU | | ATGAGGACTTTTAAAG | |
| | | | TTTCCATTTGGAA | |
| 7a_27381 | UGAUUAAACGAAC | 485 | GCAACCAATGGAGATT | 683 |
| | AUGAAAA | | GATTAAACGAACATGA | |
| | | | AAATTATTCTTTT | |
| 7a_27750 | GACAGAAUGAUUG | 486 | CACACTCAAAAGAAAG | 684 |
| | AACUUUC | | ACAGAATGATTGAACT | |
| | | | TTCATTAATTGAC | |
| 7a_27445 | UAUCACUACCAAGA | 487 | GCTACTTGTGAGCTTT | 685 |
| | GUGUGU | | ATCACTACCAAGAGTG | |
| | | | TGTTAGAGGTACA | |
| 8b_27795 | UUAGCCUUUCUGCU | 488 | TTCTATTTGTGCTTTTT | 686 |
| | AUUCCU | | AGCCTTTCTGCTATTCC | |
| | | | TTGTTTTAATT | |
| 8b_27803 | UCUGCUAUUCCUUG | 489 | GTGCTTTTTAGCCTTTC | 687 |
| | UUUUAA | | TGCTATTCCTTGTTTTA | |
| | | | ATTATGCTTAT | |
| 8b_27888 | ACGAACAUGAAAU | 490 | ACTTGTCACGCCTAAA | 688 |
| | UUCUUGU | | CGAACATGAAATTTCT | |
| | | | TGTTTTCTTAGGA | |
| 8b_28236 | CGUGUUGUUUUAG | 491 | GAGTATCATGACGTTC | 689 |
| | AUUUCAU | | GTGTTGTTTTAGATTTC | |
| | | | ATCTAAACGAAC | |
| 8b_27895 | UGAAAUUUCUUGU | 492 | ACGCCTAAACGAACAT | 690 |
| | UUUCUUA | | GAAATTTCTTGTTTTCT | |
| | | | TAGGAATCATCA | |
| 8b_28142 | UUUACCUUUUACA | 493 | TTATACAGTTTCCTGTT | 691 |
| | AUUAAUU | | TACCTTTTACAATTAAT | |
| | | | TGCCAGGAACC | |
| 8b_27802 | UUCUGCUAUUCCUU | 494 | TGTGCTTTTTAGCCTTT | 692 |
| | GUUUUA | | CTGCTATTCCTTGTTTT | |
| | | | AATTATGCTTA | |
| 8b_27808 | UAUUCCUUGUUUU | 495 | TTTTAGCCTTTCTGCTA | 693 |
| | AAUUAUG | | TTCCTTGTTTTAATTAT | |
| | | | GCTTATTATCT | |
| 8b_27796 | UAGCCUUUCUGCUA | 496 | TCTATTTGTGCTTTTTA | 694 |
| | UUCCUU | | GCCTTTCTGCTATTCCT | |
| | | | TGTTTTAATTA | |
| 8b_27815 | UGUUUUAAUUAUG | 497 | CTTTCTGCTATTCCTTG | 695 |
| | CUUAUUA | | TTTTAATTATGCTTATT | |
| | | | ATCTTTTGGTT | |
| 8b_28044 | GCUAGAAAAUCAG | 498 | TATATTAGAGTAGGAG | 696 |
| | CACCUUU | | CTAGAAAATCAGCACC | |
| | | | TTTAATTGAATTG | |
| 8b_27794 | UUUAGCCUUUCUGC | 499 | CTTCTATTTGTGCTTTT | 697 |
| | UAUUCC | | TAGCCTTTCTGCTATTC | |
| | | | CTTGTTTTAAT | |
| 8b_28234 | UUCGUGUUGUUUU | 500 | TAGAGTATCATGACGT | 698 |
| | AGAUUUC | | TCGTGTTGTTTTAGATT | |
| | | | TCATCTAAACGA | |
| 8b_27817 | UUUUAAUUAUGCU | 501 | TTCTGCTATTCCTTGTT | 699 |
| | UAUUAUC | | TTAATTATGCTTATTAT | |
| | | | CTTTTGGTTCT | |
| 8b_27970 | CUCAACAUCAACCA | 502 | GTTTACAGTCATGTAC | 700 |
| | UAUGUA | | TCAACATCAACCATAT | |
| | | | GTAGTTGATGACC | |
| 8b_28043 | AGCUAGAAAAUCA | 503 | GTATATTAGAGTAGGA | 701 |
| | GCACCUU | | GCTAGAAAATCAGCAC | |
| | | | CTTTAATTGAATT | |
| 8b_28219 | UAGAGUAUCAUGA | 504 | TCTATGAAGACTTTTTA | 702 |
| | CGUUCGU | | GAGTATCATGACGTTC | |
| | | | GTGTTGTTTTAG | |
| 8b_27764 | ACUUUCAUUAAUU | 505 | AGACAGAATGATTGAA | 703 |
| | GACUUCU | | CTTTCATTAATTGACTT | |
| | | | CTATTTGTGCTT | |
| 8b_27963 | UCAUGUACUCAACA | 506 | GAATGTAGTTTACAGT | 704 |
| | UCAACC | | CATGTACTCAACATCA | |
| | | | ACCATATGTAGTT | |
| 8b_28104 | AUUCAGUACAUCG | 507 | GGTTCTAAATCACCCA | 705 |
| | AUAUCGG | | TTCAGTACATCGATAT | |
| | | | CGGTAATTATACA | |
| 8b_28018 | AUUCUAAAUGGUA | 503 | GTCCTATTCACTTCTAT | 706 |
| | UAUUAGA | | TCTAAATGGTATATTA | |
| | | | GAGTAGGAGCTA | |
| 8b_27892 | ACAUGAAAUUUCU | 509 | GTCACGCCTAAACGAA | 707 |
| | UGUUUUC | | CATGAAATTTCTTGTTT | |
| | | | TCTTAGGAATCA | |
| E_26390 | UGAGUCUUGUAAA | 510 | GCAATATTGTTAACGT | 708 |
| | ACCUUCU | | GAGTCTTGTAAAACCT | |
| | | | TCTTTTTACGTTT | |
| E_26391 | GAGUCUUGUAAAA | 511 | CAATATTGTTAACGTG | 709 |
| | CCUUCUU | | AGTCTTGTAAAACCTT | |
| | | | CTTTTTACGTTTA | |
| E_26392 | AGUCUUGUAAAAC | 512 | AATATTGTTAACGTGA | 710 |
| | CUUCUUU | | GTCTTGTAAAACCTTCT | |
| | | | TTTTACGTTTAC | |
| E_26468 | UCUAAACGAACUA | 513 | TTCCTGATCTTCTGGTC | 711 |
| | AAUAUUA | | TAAACGAACTAAATAT | |
| | | | TATATTAGTTTT | |
| E_26321 | UCUUGCUAGUUAC | 514 | TTGCTTTCGTGGTATTC | 712 |
| | ACUAGCC | | TTGCTAGTTACACTAG | |
| | | | CCATCCTTACTG | |
| E_26259 | UUCGGAAGAGACA | 515 | TATGTACTCATTCGTTT | 713 |
| | GGUACGU | | CGGAAGAGACAGGTAC | |
| | | | GTTAATAGTTAA | |
| E_26460 | UCUUCUGGUCUAA | 516 | TTCTAGAGTTCCTGATC | 714 |
| | ACGAACU | | TTCTGGTCTAAACGAA | |
| | | | CTAAATATTATA | |
| E_26284 | GUUAAUAGCGUAC | 517 | ACAGGTACGTTAATAG | 715 |
| | UUCUUUU | | TTAATAGCGTACTTCTT | |
| | | | TTTCTTGCTTTC | |
| E_26314 | GUGGUAUUCUUGC | 518 | CTTTTTCTTGCTTTCGT | 716 |
| | UAGUUAC | | GGTATTCTTGCTAGTTA | |
| | | | CACTAGCCATC | |
| E_26274 | UACGUUAAUAGUU | 519 | TTCGGAAGAGACAGGT | 717 |
| | AAUAGCG | | ACGTTAATAGTTAATA | |
| | | | GCGTACTTCTTTT | |
| E_26260 | UCGGAAGAGACAG | 520 | ATGTACTCATTCGTTTC | 718 |
| | GUACGUU | | GGAAGAGACAGGTAC | |
| | | | GTTAATAGTTAAT | |
| E_26308 | GCUUUCGUGGUAU | 521 | GTACTTCTTTTTCTTGC | 719 |
| | UCUUGCU | | TTTCGTGGTATTCTTGC | |
| | | | TAGTTACACTA | |
| E_26411 | UUUACGUUUACUC | 522 | TTGTAAAACCTTCTTTT | 720 |
| | UCGUGUU | | TACGTTTACTCTCGTGT | |
| | | | TAAAAATCTGA | |
| E_26265 | AGAGACAGGUACG | 523 | CTCATTCGTTTCGGAA | 721 |
| | UUAAUAG | | GAGACAGGTACGTTAA | |
| | | | TAGTTAATAGCGT | |
| E_26279 | UAAUAGUUAAUAG | 524 | AAGAGACAGGTACGTT | 722 |
| | CGUACUU | | AATAGTTAATAGCGTA | |
| | | | CTTCTTTTTCTTG | |
| E_26312 | UCGUGGUAUUCUU | 525 | TTCTTTTTCTTGCTTTC | 723 |
| | GCUAGUU | | GTGGTATTCTTGCTAGT | |
| | | | TACACTAGCCA | |
| E_26464 | CUGGUCUAAACGA | 526 | AGAGTTCCTGATCTTCT | 724 |
| | ACUAAAU | | GGTCTAAACGAACTAA | |
| | | | ATATTATATTAG | |
| E_26231 | AUGAGUACGAACU | 527 | TGTAAGCACAAGCTGA | 725 |
| | UAUGUAC | | TGAGTACGAACTTATG | |
| | | | TACTCATTCGTTT | |
| E_26469 | CUAAACGAACUAA | 528 | TCCTGATCTTCTGGTCT | 726 |
| | AUAUUAU | | AAACGAACTAAATATT | |
| | | | ATATTAGTTTTT | |
| E_26413 | UACGUUUACUCUCG | 529 | GTAAAACCTTCTTTTTA | 727 |
| | UGUUAA | | CGTTTACTCTCGTGTTA | |
| | | | AAAATCTGAAT | |
| E_26281 | AUAGUUAAUAGCG | 530 | GAGACAGGTACGTTAA | 728 |
| | UACUUCU | | TAGTTAATAGCGTACT | |
| | | | TCTTTTTCTTGCT | |
| E_26462 | UUCUGGUCUAAAC | 531 | CTAGAGTTCCTGATCTT | 729 |
| | GAACUAA | | CTGGTCTAAACGAACT | |
| | | | AAATATTATATT | |
| M_26517 | UUAGCCAUGGCAG | 532 | TTTGGAACTTTAATTTT | 730 |
| | AUUCCAA | | AGCCATGGCAGATTCC | |
| | | | AACGGTACTATT | |
| M_26522 | CAUGGCAGAUUCCA | 533 | AACTTTAATTTTAGCC | 731 |
| | ACGGUA | | ATGGCAGATTCCAACG | |
| | | | GTACTATTACCGT | |
| M_26656 | UUUUGUAUAUAAU | 534 | CCAACAGGAATAGGTT | 732 |
| | UAAGUUA | | TTTGTATATAATTAAGT | |
| | | | TAATTTTCCTCT | |
| M_26603 | AUUCCUUACAUGG | 535 | AGTAATAGGTTTCCTA | 733 |
| | AUUUGUC | | TTCCTTACATGGATTTG | |
| | | | TCTTCTACAATT | |
| M_26572 | UUGAACAAUGGAA | 536 | AGCTTAAAAAGCTCCT | 734 |
| | CCUAGUA | | TGAACAATGGAACCTA | |
| | | | GTAATAGGTTTCC | |
| M_27101 | UGCUGCAUACAGUC | 537 | AGGTGACTCAGGTTTT | 735 |
| | GCUACA | | GCTGCATACAGTCGCT | |
| | | | ACAGGATTGGCAA | |
| M_27049 | UUUCUUAUUACAA | 538 | CTACATCACGAACGCT | 736 |
| | AUUGGGA | | TTCTTATTACAAATTGG | |
| | | | GAGCTTCGCAGC | |
| M_26580 | UGGAACCUAGUAA | 539 | AAGCTCCTTGAACAAT | 737 |
| | UAGGUUU | | GGAACCTAGTAATAGG | |
| | | | TTTCCTATTCCTT | |
| M_26733 | UACAGAAUAAAUU | 540 | GTGCTTGCTGCTGTTTA | 738 |
| | GGAUCAC | | CAGAATAAATTGGATC | |
| | | | ACCGGTGGAATT | |
| M_26495 | UUUUCUGUUUGGA | 541 | AAATATTATATTAGTTT | 739 |
| | ACUUUAA | | TTCTGTTTGGAACTTTA | |
| | | | ATTTTAGCCAT | |
| M_26608 | UUACAUGGAUUUG | 542 | TAGGTTTCCTATTCCTT | 740 |
| | UCUUCUA | | ACATGGATTTGTCTTCT | |
| | | | ACAATTTGCCT | |
| M_26590 | UAAUAGGUUUCCU | 543 | AACAATGGAACCTAGT | 741 |
| | AUUCCUU | | AATAGGTTTCCTATTCC | |
| | | | TTACATGGATTT | |
| M_26501 | GUUUGGAACUUUA | 544 | TATATTAGTTTTTCTGT | 742 |
| | AUUUUAG | | TTGGAACTTTAATTTTA | |
| | | | GCCATGGCAGA | |
| M_26796 | UGGCUCAGCUACUU | 545 | CTTGTAGGCTTGATGT | 743 |
| | CAUUGC | | GGCTCAGCTACTTCAT | |
| | | | TGCTTCTTTCAGA | |
| M_26570 | CCUUGAACAAUGG | 546 | AGAGCTTAAAAAGCTC | 744 |
| | AACCUAG | | CTTGAACAATGGAACC | |
| | | | TAGTAATAGGTTT | |
| M_27124 | UUGGCAACUAUAA | 547 | ACAGTCGCTACAGGAT | 745 |
| | AUUAAAC | | TGGCAACTATAAATTA | |
| | | | AACACAGACCATT | |
| M_26814 | GCUUCUUUCAGACU | 548 | CTCAGCTACTTCATTGC | 746 |
| | GUUUGC | | TTCTTTCAGACTGTTTG | |
| | | | CGCGTACGCGT | |
| M_26694 | UGGCCAGUAACUU | 549 | TTCCTCTGGCTGTTATG | 747 |
| | UAGCUUG | | GCCAGTAACTTTAGCT | |
| | | | TGTTTTGTGCTT | |
| M_27047 | GCUUUCUUAUUAC | 550 | TGCTACATCACGAACG | 748 |
| | AAAUUGG | | CTTTCTTATTACAAATT | |
| | | | GGGAGCTTCGCA | |
| M_27153 | UCCAGUAGCAGUG | 551 | TTAAACACAGACCATT | 749 |
| | ACAAUAU | | CCAGTAGCAGTGACAA | |
| | | | TATTGCTTTGCTT | |
| M_27163 | GUGACAAUAUUGC | 552 | ACCATTCCAGTAGCAG | 750 |
| | UUUGCUU | | TGACAATATTGCTTTG | |
| | | | CTTGTACAGTAAG | |
| M_26473 | ACGAACUAAAUAU | 553 | GATCTTCTGGTCTAAA | 751 |
| | UAUAUUA | | CGAACTAAATATTATA | |
| | | | TTAGTTTTTCTGT | |
| N_29327 | UUGCUGAAUAAGC | 554 | AAAGATCAAGTCATTT | 752 |
| | AUAUUGA | | TGCTGAATAAGCATAT | |
| | | | TGACGCATACAAA | |
| N_29216 | UUCGGAAUGUCGC | 555 | AGCGCTTCAGCGTTCT | 753 |
| | GCAUUGG | | TCGGAATGTCGCGCAT | |
| | | | TGGCATGGAAGTC | |
| N_28486 | CGUUCCAAUUAACA | 556 | CCCTCGAGGACAAGGC | 754 |
| | CCAAUA | | GTTCCAATTAACACCA | |
| | | | ATAGCAGTCCAGA | |
| N_28755 | UUCCUCAAGGAACA | 557 | CAATCGTGCTACAACT | 755 |
| | ACAUUG | | TCCTCAAGGAACAACA | |
| | | | TTGCCAAAAGGCT | |
| N_28585 | CAGUCCAAGAUGG | 558 | TAAAATGAAAGATCTC | 756 |
| | UAUUUCU | | AGTCCAAGATGGTATT | |
| | | | TCTACTACCTAGG | |
| N_28565 | GACGGUAAAAUGA | 559 | CGAATTCGTGGTGGTG | 757 |
| | AAGAUCU | | ACGGTAAAATGAAAGA | |
| | | | TCTCAGTCCAAGA | |
| N_28961 | CUUGAGAGCAAAA | 560 | GACAGATTGAACCAGC | 758 |
| | UGUCUGG | | TTGAGAGCAAAATGTC | |
| | | | TGGTAAAGGCCAA | |
| N_29310 | UCAAAGAUCAAGU | 561 | ACAAAGATCCAAATTT | 759 |
| | CAUUUUG | | CAAAGATCAAGTCATT | |
| | | | TTGCTGAATAAGC | |
| N_29177 | CCGCAAAUUGCACA | 562 | GATTACAAACATTGGC | 760 |
| | AUUUGC | | CGCAAATTGCACAATT | |
| | | | TGCCCCCAGCGCT | |
| N_28261 | CGAACAAACUAAA | 563 | TAGATTTCATCTAAAC | 761 |
| | AUGUCUG | | GAACAAACTAAAATGT | |
| | | | CTGATAATGGACC | |
| N_28476 | GAGGACAAGGCGU | 564 | ACCTTAAATTCCCTCG | 762 |
| | UCCAAUU | | AGGACAAGGCGTTCCA | |
| | | | ATTAACACCAATA | |
| N_29130 | UUGGGGACCAGGA | 565 | AAACCCAAGGAAATTT | 763 |
| | ACUAAUC | | TGGGGACCAGGAACTA | |
| | | | ATCAGACAAGGAA | |
| N_29455 | UCUUCCUGCUGCAG | 566 | GCAAACTGTGACTCTT | 764 |
| | AUUUGG | | CTTCCTGCTGCAGATTT | |
| | | | GGATGATTTCTC | |
| N_29465 | GCAGAUUUGGAUG | 567 | ACTCTTCTTCCTGCTGC | 765 |
| | AUUUCUC | | AGATTTGGATGATTTC | |
| | | | TCCAAACAATTG | |
| N_29132 | GGGGACCAGGAAC | 568 | ACCCAAGGAAATTTTG | 766 |
| | UAAUCAG | | GGGACCAGGAACTAAT | |
| | | | CAGACAAGGAACT | |
| N_29148 | UCAGACAAGGAAC | 569 | GGGACCAGGAACTAAT | 767 |
| | UGAUUAC | | CAGACAAGGAACTGAT | |
| | | | TACAAACATTGGC | |
| N_29291 | GAUGACAAAGAUC | 570 | GGTGCCATCAAATTGG | 768 |
| | CAAAUUU | | ATGACAAAGATCCAAA | |
| | | | TTTCAAAGATCAA | |
| N_29342 | AUUGACGCAUACA | 571 | TTGCTGAATAAGCATA | 769 |
| | AAACAUU | | TTGACGCATACAAAAC | |
| | | | ATTCCCACCAACA | |
| N_28589 | CCAAGAUGGUAUU | 572 | ATGAAAGATCTCAGTC | 770 |
| | UCUACUA | | CAAGATGGTATTTCTA | |
| | | | CTACCTAGGAACT | |
| N_29133 | GGGACCAGGAACU | 573 | CCCAAGGAAATTTTGG | 771 |
| | AAUCAGA | | GGACCAGGAACTAATC | |
| | | | AGACAAGGAACTG | |
| N_29057 | CGUACUGCCACUAA | 574 | AAGCCTCGGCAAAAAC | 772 |
| | AGCAUA | | GTACTGCCACTAAAGC | |
| | | | ATACAATGTAACA | |
| N_28682 | GGAGCCUUGAAUA | 575 | TGGGTTGCAACTGAGG | 773 |
| | CACCAAA | | GAGCCTTGAATACACC | |
| | | | AAAAGATCACATT | |
| orf1a_7249 | UUUGGCAUAUAUU | 576 | AGTTGCAGAGTGGTTT | 774 |
| | CUUUUCA | | TTGGCATATATTCTTTT | |
| | | | CACTAGGTTTTT | |
| orf1a_1066 | UGGGGAAUGUCCA | 577 | ATTTGACACCTTCAAT | 775 |
| | AAUUUUG | | GGGGAATGTCCAAATT | |
| | | | TTGTATTTCCCTT | |
| orf1a_11197 | UGCCACUGUAGCUU | 578 | TTTGTTACCTTCTCTTG | 776 |
| | AUUUUA | | CCACTGTAGCTTATTTT | |
| | | | AATATGGTCTA | |
| orf1a_13292 | UGUGACUUAAAAG | 579 | AATCCTAAAGGATTTT | 777 |
| | GUAAGUA | | GTGACTTAAAAGGTAA | |
| | | | GTATGTACAAATA | |
| orf1a_12931 | UCCUAAAGUGAAG | 580 | AGACACACCTAAAGGT | 778 |
| | UAUUUAU | | CCTAAAGTGAAGTATT | |
| | | | TATACTTTATTAA | |
| orf1a_4598 | CUUGUUACAAUGCC | 581 | GATCTAAATGAAACTC | 779 |
| | ACUUGG | | TTGTTACAATGCCACTT | |
| | | | GGCTATGTAACA | |
| orf1a_12515 | UGUGAUGGUACAA | 582 | ACATATAAAAATACGT | 780 |
| | CAUUUAC | | GTGATGGTACAACATT | |
| | | | TACTTATGCATCA | |
| orf1a_9060 | AUUGUUAUGAUAC | 583 | GTAAGCCAGTACCATA | 781 |
| | CAAUGUA | | TTGTTATGATACCAAT | |
| | | | GTACTAGAAGGTT | |
| orf1a_1286 | UGCGAAUUUUGUG | 584 | TTTGTTAAAGCCACTT | 782 |
| | GCACUGA | | GCGAATTTTGTGGCAC | |
| | | | TGAGAATTTGACT | |
| orf1a_9707 | AUUUCCACAAAGC | 585 | GCTTATATCATTTGTAT | 783 |
| | AUUUCUA | | TTCCACAAAGCATTTC | |
| | | | TATTGGTTCTTT | |
| orf1a_5110 | UAAAACAUUUUAU | 586 | TAATTCACATGAAGGT | 784 |
| | GUUUUAC | | AAAACATTTTATGTTTT | |
| | | | ACCTAATGATGA | |
| orf1a_9041 | UCUGGUAAGCCAG | 587 | ATTTTTAAAGATGCTTC | 785 |
| | UACCAUA | | TGGTAAGCCAGTACCA | |
| | | | TATTGTTATGAT | |
| orf1a_11687 | CUUGGUGUUUAUG | 588 | TACTTTAGACTGACTCT | 786 |
| | AUUACUU | | TGGTGTTTATGATTACT | |
| | | | TAGTTTCTACA | |
| orf1a_12215 | UUGAAUGUGGCUA | 589 | AAGTTGAAGAAGTCTT | 787 |
| | AAUCUGA | | TGAATGTGGCTAAATC | |
| | | | TGAATTTGACCGT | |
| orf1a_11254 | UAUGACAUGGUUG | 590 | TTGGGTGATGCGTATT | 788 |
| | GAUAUGG | | ATGACATGGTTGGATA | |
| | | | TGGTTGATACTAG | |
| orf1a_6963 | UUUUACUAUUAAG | 591 | ATATTATAATTTGGTTT | 789 |
| | UGUUUGC | | TTACTATTAAGTGTTTG | |
| | | | CCTAGGTTCTT | |
| orf1a_2969 | AUGGCUACAUACU | 592 | TTAGATGAGTGGAGTA | 790 |
| | ACUUAUU | | TGGCTACATACTACTT | |
| | | | ATTTGATGAGTCT | |
| orf1a_5449 | UAGAGAAACAAUG | 593 | TGAGTTAGGTGATGTT | 791 |
| | AGUUACU | | AGAGAAACAATGAGTT | |
| | | | ACTTGTTTCAACA | |
| orf1a_5238 | ACCCACAAGUUAAU | 594 | CTAAAAAGTGGAAATA | 792 |
| | GGUUUA | | CCCACAAGTTAATGGT | |
| | | | TTAACTTCTATTA | |
| orf1a_8059 | UUCAUCAACUUUU | 595 | TTACGTTAATACGTTTT | 793 |
| | AACGUAC | | CATCAACTTTTAACGT | |
| | | | ACCAATGGAAAA | |
| orf1a_12276 | UGGCUGAUCAAGC | 596 | GTAAGTTGGAAAAGAT | 794 |
| | UAUGACC | | GGCTGATCAAGCTATG | |
| | | | ACCCAAATGTATA | |
| orf1a_4097 | UUCUUAAAGAAAG | 597 | GACATTGACATCACTT | 795 |
| | AUGCUCC | | TCTTAAAGAAAGATGC | |
| | | | TCCATATATAGTG | |
| orf1ab_19120 | UAUAAAAUAGAAG | 598 | TGTAGTGACAAAGCTT | 796 |
| | AAUUAUU | | ATAAAATAGAAGAATT | |
| | | | ATTCTATTCTTAT | |
| orf1ab_17193 | GAAGGCAUUAAAA | 599 | TGATGCACTATGTGAG | 797 |
| | UAUUUGC | | AAGGCATTAAAATATT | |
| | | | TGCCTATAGATAA | |
| orf1ab_17034 | UGCAAAUUAUCAA | 600 | GTTTTCTAGCAATGTTG | 798 |
| | AAGGUUG | | CAAATTATCAAAAGGT | |
| | | | TGGTATGCAAAA | |
| orf1ab_19748 | UUGAAAAUAAAAC | 601 | TTGATGTAGAATTGTTT | 799 |
| | AACAUUA | | GAAAATAAAACAACAT | |
| | | | TACCTGTTAATG | |
| orf1ab_17980 | UAUGACAAGUUGC | 602 | TCTGATAGAGACCTTT | 800 |
| | AAUUUAC | | ATGACAAGTTGCAATT | |
| | | | TACAAGTCTTGAA | |
| orf1ab_21482 | UUAGUAAAGGUAG | 603 | TGATTTTATCTCTTCTT | 801 |
| | ACUUAUA | | AGTAAAGGTAGACTTA | |
| | | | TAATTAGAGAAA | |
| orf1ab_13842 | UGAUGAAGGUAAU | 604 | TGCTTTAAGGCATTTTG | 802 |
| | UGUGACA | | ATGAAGGTAATTGTGA | |
| | | | CACATTAAAAGA | |
| orf1ab_19071 | UGAUGUAGAAUGG | 605 | GTGTGTACCTCAAGCT | 803 |
| | AAGUUCU | | GATGTAGAATGGAAGT | |
| | | | TCTATGATGCACA | |
| orf1ab_13878 | UGUCACAUACAAU | 606 | ATTAAAAGAAATACTT | 804 |
| | UGUUGUG | | GTCACATACAATTGTT | |
| | | | GTGATGATGATTA | |
| orf1ab_16555 | AAUGCAAUUGCAA | 607 | AATGTTACTGACTTTA | 805 |
| | CAUGUGA | | ATGCAATTGCAACATG | |
| | | | TGACTGGACAAAT | |
| orf1ab_17284 | UCAACAUUAGAAC | 608 | AAATTCAAAGTGAATT | 806 |
| | AGUAUGU | | CAACATTAGAACAGTA | |
| | | | TGTCTTTTGTACT | |
| orf1ab_17852 | CAGAAUAUGACUA | 609 | ATTCATCACAGGGCTC | 807 |
| | UGUCAUA | | AGAATATGACTATGTC | |
| | | | ATATTCACTCAAA | |
| orf1ab_17671 | GUUAUCACGCAUG | 610 | ATGTTTTATAAGGGTG | 808 |
| | AUGUUUC | | TTATCACGCATGATGT | |
| | | | TTCATCTGCAATT | |
| orf1ab_21331 | CAUGCAAAUUACA | 611 | GATGGTTATGTCATGC | 809 |
| | UAUUUUG | | ATGCAAATTACATATT | |
| | | | TTGGAGGAATACA | |
| orf1ab_18612 | GUUGACAUCUAUG | 612 | GGCACATGGCTTTGAG | 810 |
| | AAGUAUU | | TTGACATCTATGAAGT | |
| | | | ATTTTGTGAAAAT | |
| orf1ab_19345 | UUUGUUAAUUUAA | 613 | TTTGATAAAAGTGCTT | 811 |
| | AACAAUU | | TTGTTAATTTAAAACA | |
| | | | ATTACCATTTTTC | |
| orf1ab_15409 | AAUGAGUGUGCUC | 614 | TTCTATAGATTAGCTA | 812 |
| | AAGUAUU | | ATGAGTGTGCTCAAGT | |
| | | | ATTGAGTGAAATG | |
| orf1ab_19617 | UCAGAGUUUAGAA | 615 | CACTTTTACAAGACTT | 813 |
| | AAUGUGG | | CAGAGTTTAGAAAATG | |
| | | | TGGCTTTTAATGT | |
| orf1ab_21444 | AAAAGAAGGUCAA | 616 | TGCTGTTATGTCTTTA | 814 |
| | AUCAAUG | | AAAGAAGGTCAAATCA | |
| | | | ATGATATGATTTT | |
| orf1ab_20511 | AUUACUUGAUGAU | 617 | TTCTGTTATTGATTTA | 815 |
| | UUUGUUG | | TTACTTGATGATTTTG | |
| | | | TTGAAATAATAAA | |
| orf1ab_21174 | AGAACAUUCUUGG | 618 | GGCTATAAAGATAACA | 816 |
| | AAUGCUG | | GAACATTCTTGGAATG | |
| | | | CTGATCTTTATAA | |
| orf1ab_19732 | GUUGAUGUAGAAU | 619 | ACAAAAGTTGATGGTG | 817 |
| | UGUUUGA | | TTGATGTAGAATTGTT | |
| | | | TGAAAATAAAACA | |
| S_24473 | GGUGCAAUUUCAA | 620 | CTTAGCTCCAATTTTGG | 818 |
| | GUGUUUU | | TGCAATTTCAAGTGTTT | |
| | | | TAAATGATATC | |
| S_22368 | AUCUUCAACCUAGG | 621 | CTTATTATGTGGGTTAT | 819 |
| | ACUUUU | | CTTCAACCTAGGACTT | |
| | | | TTCTATTAAAAT | |
| S_24635 | GCUGCUACUAAAA | 622 | GCTTCTGCTAATCTTGC | 820 |
| | UGUCAGA | | TGCTACTAAAATGTCA | |
| | | | GAGTGTGTACTT | |
| S_21952 | CUGUGAAUUUCAA | 623 | TGTTGTTATTAAAGTCT | 821 |
| | UUUUGUA | | GTGAATTTCAATTTTGT | |
| | | | AATGATCCATT | |
| S_23698 | UGCCAUACCCACAA | 624 | CTCTAATAACTCTATTG | 822 |
| | AUUUUA | | CCATACCCACAAATTT | |
| | | | TACTATTAGTGT | |
| S_23936 | CCACCAAUUAAAGA | 625 | CAAATTTACAAAACAC | 823 |
| | UUUUGG | | CACCAATTAAAGATTT | |
| | | | TGGTGGTTTTAAT | |
| S_22807 | UGGAAAGAUUGCU | 626 | CGCTCCAGGGCAAACT | 824 |
| | GAUUAUA | | GGAAAGATTGCTGATT | |
| | | | ATAATTATAAATT | |
| S_21938 | GUUGUUAUUAAAG | 627 | AATAACGCTACTAATG | 825 |
| | UCUGUGA | | TTGTTATTAAAGTCTGT | |
| | | | GAATTTCAATTT | |
| S_22138 | UGUGUUUAAGAAU | 628 | AAATCTTAGGGAATTT | 826 |
| | AUUGAUG | | GTGTTTAAGAATATTG | |
| | | | ATGGTTATTTTAA | |
| S_24828 | UUCCUCGUGAAGG | 629 | ATGGAAAAGCACACTT | 827 |
| | UGUCUUU | | TCCTCGTGAAGGTGTC | |
| | | | TTTGTTTCAAATG | |
| S_23315 | CUUGACAUUACACC | 630 | CAGACACTTGAGATTC | 828 |
| | AUGUUC | | TTGACATTACACCATG | |
| | | | TTCTTTTGGTGGT | |
| S_25376 | UACACAUAAACGA | 631 | GGAGTCAAATTACATT | 829 |
| | ACUUAUG | | ACACATAAACGAACTT | |
| | | | ATGGATTTGTTTA | |
| S_22259 | AUUAACAUCACUA | 632 | GATTTGCCAATAGGTA | 830 |
| | GGUUUCA | | TTAACATCACTAGGTT | |
| | | | TCAAACTTTACTT | |
| S_22129 | UAGGGAAUUUGUG | 633 | TAATTTCAAAAATCTT | 831 |
| | UUUAAGA | | AGGGAATTTGTGTTTA | |
| | | | AGAATATTGATGG | |
| S_24254 | UUUGCUAUGCAAA | 634 | GCATTACAAATACCAT | 832 |
| | UGGCUUA | | TTGCTATGCAAATGGC | |
| | | | TTATAGGTTTAAT | |
| S_22276 | UCAAACUUUACUU | 635 | TAACATCACTAGGTTT | 833 |
| | GCUUUAC | | CAAACTTTACTTGCTTT | |
| | | | ACATAGAAGTTA | |
| S_23270 | GCUGACACUACUGA | 636 | TTTGGCAGAGACATTG | 834 |
| | UGCUGU | | CTGACACTACTGATGC | |
| | | | TGTCCGTGATCCA | |
| S_25235 | AUUGCCAUAGUAA | 637 | TTTATAGCTGGCTTGAT | 835 |
| | UGGUGAC | | TGCCATAGTAATGGTG | |
| | | | ACAATTATGCTT | |
| S_23842 | UACACAAUUAAACC | 638 | ATATGGCAGTTTTTGT | 836 |
| | GUGCUU | | ACACAATTAAACCGTG | |
| | | | CTTTAACTGGAAT | |
| S_23307 | UUGAGAUUCUUGA | 639 | GTGATCCACAGACACT | 837 |
| | CAUUACA | | TGAGATTCTTGACATT | |
| | | | ACACCATGTTCTT | |
| S_21808 | UGUCCUACCAUUUA | 640 | GAGGTTTGATAACCCT | 838 |
| | AUGAUG | | GTCCTACCATTTAATG | |
| | | | ATGGTGTTTATTT | |
| S_23935 | ACCACCAAUUAAAG | 641 | ACAAATTTACAAAACA | 839 |
| | AUUUUG | | CCACCAATTAAAGATT | |
| | | | TTGGTGGTTTTAA | |

TABLE 8
Top SARS-CoV-2 based on homology.

| | | SEQ | | SEQ |
|---|---|---|---|---|
| | | ID | | ID |
| Sequence ID | 20 nt Sequence | NO: | 45 nt Gene Region | NO: |
| E_26313 | CGUGGUAUUCU | 64 | TCTTTTTCTTGCTTTCGTGGTATT | 172 |
| | UGCUAGUUA | | CTTGCTAGTTACACTAGCCAT | |
| 8b_27986 | UGUAGUUGAUG | 97 | TCAACATCAACCATATGTAGTTG | 205 |
| | ACCCGUGUC | | ATGACCCGTGTCCTATTCACTT | |
| 7a27720 | UAUAACACUUU | 93 | TGCGGCAATAGTGTTTATAACAC | 201 |
| | GCUUCACAC | | TTTGCTTCACACTCAAAAGAAA | |
| orf1ab_14080 | GGUAACUGGUA | 11 | AATCAAGATCTCAATGGTAACTG | 119 |
| | UGAUUUCGG | | GTATGATTTCGGTGATTTCATA | |
| M_26581 | GGAACCUAGUA | 72 | AGCTCCTTGAACAATGGAACCTA | 180 |
| | AUAGGUUUC | | GTAATAGGTTTCCTATTCCTTA | |
| 522820 | GAUUAUAAUUA | 38 | ACTGGAAAGATTGCTGATTATAA | 146 |
| | UAAAUUACC | | TTATAAATTACCAGATGATTTT | |
| orf1ab_21391 | UUUGACAUGAG | 22 | TCTTCCTATTCTTTATTTGACATG | 130 |
| | UAAAUUUCC | | AGTAAATTTCCCCTTAAATTA | |
| orf1ab_17107 | UUUGCUAUUGG | 16 | ACTGGTAAGAGTCATTTTGCTAT | 124 |
| | CCUAGCUCU | | TGGCCTAGCTCTCTACTACCCT | |
| orf1ab_20892 | UGCACCAGGUA | 21 | TTCTGATAAAGGAGTTGCACCAG | 129 |
| | CAGCUGUUU | | GTACAGCTGTTTTAAGACAGTG | |
| orf1ab_20497 | UCUGUUAUUGA | 20 | TCTAAGTGTGTGTGTTCTGTTATT | 128 |
| | UUUAUUACU | | GATTTATTACTTGATGATTTT | |
| N_28655 | GACGGCAUCAU | 108 | TATGGTGCTAACAAAGACGGCAT | 216 |
| | AUGGGUUGC | | CATATGGGTTGCAACTGAGGGA | |
| 524289 | UGGAGUUACAC | 45 | TAGGTTTAATGGTATTGGAGTTA | 153 |
| | AGAAUGUUC | | CACAGAATGTTCTCTATGAGAA | |
| M_26624 | UCUACAAUUUG | 74 | TACATGGATTTGTCTTCTACAATT | 182 |
| | CCUAUGCCA | | TGCCTATGCCAACAGGAATAG | |
| orf1a_7643 | GCUGGUAGUAC | 28 | TGTGATACATTCTGTGCTGGTAG | 136 |
| | AUUUAUUAG | | TACATTTATTAGTGATGAAGTT | |
| orf1a_12932 | CCUAAAGUGAA | 34 | GACACACCTAAAGGTCCTAAAGT | 142 |
| | GUAUUUAUA | | GAAGTATTTATACTTTATTAAA | |
| E_26305 | CUUGCUUUCGU | 63 | AGCGTACTTCTTTTTCTTGCTTTC | 171 |
| | GGUAUUCUU | | GTGGTATTCTTGCTAGTTACA | |
| M_26602 | UAUUCCUUACA | 73 | TAGTAATAGGTTTCCTATTCCTTA | 181 |
| | UGGAUUUGU | | CATGGATTTGTCTTCTACAAT | |
| 3a_25630 | GUUUGCAACUU | 48 | AAGGGTGTTCACTTTGTTTGCAA | 156 |
| | GCUGUUGUU | | CTTGCTGTTGTTGTTTGTAACA | |
| E_26455 | CCUGAUCUUCU | 67 | AATTCTTCTAGAGTTCCTGATCTT | 175 |
| | GGUCUAAAC | | CTGGTCTAAACGAACTAAATA | |
| E_26463 | UCUGGUCUAAA | 68 | TAGAGTTCCTGATCTTCTGGTCTA | 176 |
| | CGAACUAAA | | AACGAACTAAATATTATATTA | |
| 522550 | CCUAAUAUUAC | 37 | TCTATTGTTAGATTTCCTAATATT | 145 |
| | AAACUUGUG | | ACAAACTTGTGCCCTTTTGGT | |
| orf1a_8744 | UUUGCUAACAA | 31 | TCTACAGATACTTGTTTTGCTAAC | 139 |
| | ACAUGCUGA | | AAACATGCTGATTTTGACACA | |
| orf1ab_17370 | GGCCACAAAUU | 17 | TGATGAAATTTCAATGGCCACAA | 125 |
| | AUGAUUUGA | | ATTATGATTTGAGTGTTGTCAA | |
| 7a_27633 | AUCAGUUUCAC | 88 | TCAGTTACGTGCCAGATCAGTTT | 196 |
| | CUAAACUGU | | CACCTAAACTGTTCATCAGACA | |
| M_27014 | GCCUAAAGAAA | 79 | TGACATCAAGGACCTGCCTAAAG | 187 |
| | UCACUGUUG | | AAATCACTGTTGCTACATCACG | |
| S_25375 | UUACACAUAAA | 46 | AGGAGTCAAATTACATTACACAT | 154 |
| | CGAACUUAU | | AAACGAACTTATGGATTTGTTT | |
| 7a_27715 | GUGUUUAUAAC | 92 | ATTGTTGCGGCAATAGTGTTTAT | 200 |
| | ACUUUGCUU | | AACACTTTGCTTCACACTCAAA | |

TABLE 9
Antisense oligonucleotides targeting viral factors

| | | SEQ ID |
|---|---|---|
| Oligo ID | Sequence | NO: |
| orf1a_416 | ACTTCTACTAAGCCAC | 840 |
| orf1a_2290 | AAGCTTAAAGAATGTC | 841 |
| orf1a_8744-1 | CAGCATGTTTGTTAGC | 842 |
| orf1a_8744-2 | GCATGTTTGTTAGCAA | 843 |
| orf1a_9679-1 | AAGCAATTGTTATCCA | 844 |
| orf1a_9679-2 | TAAGCAATTGTTATCC | 845 |
| orf1ab_14361 | GTTTGCACAATGCAGA | 846 |
| orf1ab_17107 | AGAGCTAGGCCAATAG | 847 |
| orf1ab_18025 | AGCTTGTAAAGTTGCC | 848 |
| orf1ab_20892-1 | CAGCTGTACCTGGTGC | 849 |
| orf1ab_20892-2 | ACAGCTGTACCTGGTG | 850 |
| orf1ab_20892-3 | AACAGCTGTACCTGGT | 851 |
| S_22223-1 | AATGGTTCTAAAGCCG | 852 |
| S_22223-2 | CAATGGTTCTAAAGCC | 853 |
| S_23174 | TGAAGTTGAAATTGAC | 854 |
| S_23774 | CCACAAATGTACATTG | 855 |
| S_23778 | CAATGTACATTTGTGG | 856 |
| S_25375-1 | AGTTCGTTTATGTGTA | 857 |
| S_25375-2 | TAAGTTCGTTTATGTG | 858 |
| 3a_25717 | GAAGTAGACTAAAGCA | 859 |
| 3a_25914 | AATAGGACTTGTTGTG | 860 |
| 3a_25992 | AACTGTGTAATACAAC | 861 |
| 3a_26018-1 | ACAGCTGGTAATAGTC | 862 |
| 3a_26018-2 | CAGCTGGTAATAGTCT | 863 |
| 3a_26018-3 | TACAGCTGGTAATAGT | 864 |
| E_26258 | TACCTGTCTCTTCCGA | 865 |
| E_26261 | TAACGTACCTGTCTCT | 866 |
| E_26369-1 | AACAATATTGCAGCAG | 867 |
| E_26369-2 | TAACAATATTGCAGCA | 868 |
| E_26374-1 | CGTTAACAATATTGCA | 869 |
| E_26374-2 | CTCACGTTAACAATAT | 870 |
| M_26581-1 | ACCTATTACTAGGTTC | 871 |
| M_26581-2 | AAACCTATTACTAGGT | 872 |
| M_26602-1 | ACAAATCCATGTAAGG | 873 |
| M_26602-2 | CAAATCCATGTAAGGA | 874 |
| M_26624 | TGGCATAGGCAAATTG | 875 |
| M_26717 | GTAAACAGCAGCAAGC | 876 |
| 7a_27455 | GTACCTCTAACACACT | 877 |
| 7a_27553 | AGCAAGTCAGTGCAAA | 878 |
| 7a_27565-1 | ATTGAGTGCTAAAGCA | 879 |
| 7a_27565-2 | GCAAATTGAGTGCTAA | 880 |
| 7a_27705 | AAACACTATTGCCGCA | 881 |
| 7a_27720 | GTGTGAAGCAAAGTGT | 882 |
| 8b_27940 | AAACTACATTCTTGGT | 883 |
| 8b_28002 | AGAAGTGAATAGGACA | 884 |
| 8b_28091-1 | TGAATGGGTGATTTAG | 885 |
| 8b_28091-2 | GAATGGGTGATTTAGA | 886 |
| 8b_28119 | AAACTGTATAATTACC | 887 |
| 8b_28163 | CCCAATTTAGGTTCCT | 888 |
| N_28655 | ACCCATATGATGCCGT | 889 |
| N_28945-1 | CAAGCTGGTTCAATCT | 890 |
| N_28945-2 | GCTGGTTCAATCTGTC | 891 |
| N_29141-1 | CCTTGTCTGATTAGTT | 892 |
| N_29141-2 | CTTGTCTGATTAGTTC | 893 |
| N_29307 | AATGACTTGATCTTTG | 894 |

[0590] An alignment of siRNA and ASO selected for synthesis to six closely-related CoVs using the novel algorithm is shown in FIG. 3. Aligned genome regions of CoVs are shaded based on homology with darker coloring indicating higher homology with respect to SARS-CoV-2. The siRNA position is indicated on the top. Per position percent homology of SARS-CoV-2 to the six related CoVs is plotted on the bottom. SiRNA with low homology scores of 59 are shown in FIG. 3A. SiRNA with a high homology scores of score of 78 are shown in FIG. 3B. Gaps in alignment are indicated with dashes (-).

[0591] SiRNA and ASO target selections were based on the ability to target many SARS-CoV-2 genomes from patient isolates. siRNAs and ASOs were selected to target regions of the 9 selection genes with low mutation rates in other coronaviruses (FIG. 4A). The proportion of SARS-CoV-2 variants from patient isolates targeted by all selected siRNAs is plotted at the bottom. siRNAs and ASOs were selected to target regions of the 9 selection genes with low mutation rates in other coronaviruses (see previous figure), which resulted in selecting siRNAs that together target all isolates from SARS-CoV-infected patients, with >90% of siRNAs and ASOs selected targeting >95% of these genomes. The proportion of SARS-CoV-2 variants from patient isolates targeted by all selected siRNAs is plotted at the bottom. The coloured gradient indicates proportion of variant genomes targeted, with red indicating siRNAs that target fewer variants (with the lowest value being 77% of all variants targeted) and white indicating higher number of genomes targeted. Arrows in the gene diagram indicate siRNA and ASO target positions in the SARS-CoV2 genome and are coloured based on proportion of SARS-CoV-2 variants targeted and correlate with the colored gradient in the bottom plot. Dark red arrows indicate siRNAs that target <85% of genomes from patient isolates, while white and light pink arrows indicate siRNAs that target >90% of genomes SARS-CoV-2 isolates patients.

[0592] The scoring scheme methodology resulted in the selection of siRNAs that target all 708 SARS-CoV2 patient isolates available at the time of design with >95% of siRNAs (103 siRNAs) selected targeting more than 90% of the SARS-CoV2 genomes obtained from patient isolates. Furthermore, >60% of siRNAs (66 siRNAs) selected target more than 97% of these patient isolates.

[0593] SiRNAs targeting different genes in the SARS-CoV2 genome were tested for silencing efficacy of the orfla, 3a, 7a, orflab, E, gene 8b, S, M and N genes (FIG. 5, FIG. 7). For each target, at least 3 siRNAs were identified that that reduced target mRNA expression below 75% compared to untreated controls. siRNAs were tested in Hela cells and silencing was assessed using the psi-check reporter system, using an siRNA concentration of 1.5 uM and an assessment timepoint of 72 hours. Likewise, ASOs targeting the different genes in the SARS-CoV2 genome were tested for silencing efficacy, as depicted in FIG. 6 and FIG. 8. For each target, at least 3 ASOs were identified that reduced target mRNA expression below 75% compared to untreated controls. SiRNAs targeting the orfla, 3a, 7a, orflab, E, gene 8b, S, M and N genes in the SARS-CoV2 genome were subsequently tested for silencing efficacy in 8-point dose response studies. Each siRNA showed potent and efficacious target silencing with IC₅₀ values in the low nanomolar range.

[0594] FIG. 10 depicts a schematic showing genes comprising genome and their functions. Comprised of structural and non-structural genes. Non-structural genes undergo primary translation while structural and accessory proteins are translated from sub-genomic mRNAs. The secondary structure of sub-genomic mRNAs may enhance targetability by siRNAs.

[0595] Development and optimization of siRNA cocktails targeting SARS-CoV2. Like other RNA viruses, SARS-CoV2 mutates. Therefore, multiple siRNAs in cocktails are necessary to minimize the chances of mutant development. Several siRNA cocktails were developed targeting g+ strand only, g+ strand and terminal 3′UTR (region shared by all secondary mRNA variants), as well as a variety of other combinations. The cocktails are screened in SARS-CoV-2 infected VERO6 cells to define optimal siRNA combinations against the live virus. The strategy of targeting the + strand (orfla and orflab with S and N protein) is particularly novel and active in blocking SARS-CoV-2 infection. The cocktails are combinations of at least 3 siRNAs targeting different regions of the viral genome. Table 10 shows the compositions of the various cocktails tested.

TABLE 10
List of siRNA combinations for targeting SARS-COV-2

| Combo | Code name | Strategy | Compounds (Sequence IDs) | | |
|---|---|---|---|---|---|
| 1 | Cosmopolitan | Replication | 416 | 9679 | 21391 |
| 2 | Screwdriver | Replication | 416 | 8744 | 21391 |
| 3 | Long Island | Replication | 9679 | 8744 | 21391 |
| 4 | Negroni | Rep/Immun | 416 | 9679 | 27565 |
| 5 | Old Fashioned | Rep/Immun | 416 | 21391 | 27565 |
| 6 | Manhattan | Rep/Immun | 21391 | 27656 | 27751 |
| 7 | Moscow Mule | Rep/capsid | 416 | 23174 | 26305 |
| 8 | Daiquiri | Rep/capsid | 9679 | 23174 | 29293 |
| 9 | Martini | Rep/capsid | 21391 | 26305 | 29293 |
| 10 | Jaegger Bomb | Immun/capsid | 23174 | 26470 | 27565 |
| 11 | Bloody Mary | Immun/capsid | 23174 | 27123 | 27656 |
| 12 | White Russian | Immun/capsid | 23174 | 27032 | 27751 |
| 13 | Mojito | Rep/imm/cap | 416 | 26305 | 27565 |
| 14 | Salty Dog | Rep/imm/cap | 9679 | 26369 | 27656 |
| 15 | Hanky Panky | Rep/imm/cap | 21391 | 27032 | 27751 |

[0596] The validation and determination of IC₅₀ values for siRNA cocktails targeting SARS-CoV-2 genes are depicted in FIG. 11. SiRNA cocktails targeting different genes in the SARS-CoV2 genome were tested for silencing efficacy in 8-point dose response studies. Each siRNA showed potent and efficacious target silencing with IC₅₀ values in the low nanomolar range. Results for replication cocktails are shown in FIG. 11A, for Replication/Immuno cocktails in FIG. 11B, for Replication/Capsid cocktails in FIG. 11C, for Immuno/Capsid cocktails in FIG. 11D, and for Replication/Immuno/Capsid cocktails in FIG. 11E.

### Example 2. Targeting of Human Genes

[0597] SiRNAs targeting of ACE2, FURIN, TMPRSS2, IL-6, and IL-6 Receptor (IL-6R) can be used alone or in combination with siRNAs targeting SARS-CoV2 for comprehensive treatment of SARS-CoV-2 treatment. Hyper functional, fully chemical stabilized siRNAs were identified targeting these a selection of these host cell genes involved in infection and spread.

[0598] Studies of ACE2 knock out mice show some toxicity in the heart and muscle, thus limiting the use of traditional small molecules and antibodies that do not differentiate between tissues. EPA-conjugates have no functional delivery to muscle and heart, and thus might be a better option for ACE2 modulation. In addition, local intratracheal delivery of di-valent compounds results in minimal heart and muscle delivery, representing a very powerful option for modulation of host genes, where lung-selective targeting with minimized overall exposure is required.

[0599] Host target 45 nucleotide gene regions and 20 nucleotide target regions are summarized in Table 11A-11D and Table 12A-12E.

TABLE 11A
Host target TMPRSS-20 nucleotide targets and 45 nucleotide gene target regions

| SEQUENCE | | SEQ ID | | SEQ ID | |
|---|---|---|---|---|---|
| ID | 20 nt Sequence | NO: | 45 nt Gene Region | NO: | Species |
| TMPRSS | UCCCGCAU | 895 | AGTGACTCATGTTCAT | 1095 | mouse |
| 2_924 | GGUGGUUU | | CCCGCATGGTGGTTTC | | |
| | CUUU | | TTTGCGCTGTATA | | |
| TMPRSS | UACCACAG | 896 | CTCTATAAAAAACTCT | 1096 | mouse |
| 2_903 | UGACUCAU | | ACCACAGTGACTCATG | | |
| | GUUC | | TTCATCCCGCATG | | |
| TMPRSS | UGAGCUCA | 897 | TTATGAAGCTGAATGT | 1097 | mouse |
| 2_868 | GGCAACGU | | GAGCTCAGGCAACGT | | |
| | UGAC | | TGACCTCTATAAAA | | |
| TMPRSS | UCUUCAAA | 898 | CACAGTGATGCCTGTT | 1098 | human |
| 2_866 | AGCAGUGG | | CTTCAAAAGCAGTGGT | | |
| | UUUC | | TTCTTTACGCTGT | | |
| TMPRSS | UGUGAGCU | 899 | CTTTATGAAGCTGAAT | 1099 | mouse |
| 2_866 | CAGGCAAC | | GTGAGCTCAGGCAAC | | |
| | GUUG | | GTTGACCTCTATAA | | |
| TMPRSS | ACCACAGU | 900 | TCTATAAAAAACTGTA | 1100 | human |
| 2_849 | GAUGCCUG | | CCACAGTGATGCCTGT | | |
| | UUCU | | TCTTCAAAAGCAG | | |
| TMPRSS | CCGGCAAU | 901 | AACTGAACACAAGTG | 1101 | human |
| 2_819 | GUCGAUAU | | CCGGCAATGTCGATAT | | |
| | CUAU | | CTATAAAAAACTGT | | |
| TMPRSS | AGUGCCGG | 902 | ATGAAACTGAACACA | 1102 | human |
| 2_815 | CAAUGUCG | | AGTGCCGGCAATGTC | | |
| | AUAU | | GATATCTATAAAAAA | | |
| TMPRSS | AAAGACAU | 903 | GGGAGAGCAGCATGT | 1103 | mouse |
| 2_783 | GGGAUACA | | AAAGACATGGGATAC | | |
| | AGAA | | AAGAACAATTTTTAT | | |
| TMPRSS | UUUACUCU | 904 | GCTATAAGAATAATTT | 1104 | human |
| 2_753 | AGCCAAGG | | TTACTCTAGCCAAGGA | | |
| | AAUA | | ATAGTGGATGACA | | |
| TMPRSS | GCUUCAUC | 905 | GTCTCTACGGACAAA | 1105 | mouse |
| 2_691 | CUCCAGGU | | GCTTCATCCTCCAGGT | | |
| | UUAC | | TTACTCATCTCAGA | | |
| TMPRSS | ACGGACAA | 906 | GTTGTGTTCGTCTCTA | 1106 | mouse |
| 2_682 | AGCUUCAU | | CGGACAAAGCTTCATC | | |
| | CCUC | | CTCCAGGTTTACT | | |
| TMPRSS | UGGGUCUU | 907 | GTCTGAGATGGAGTGT | 1107 | mouse |
| 2_587 | CAGGCACA | | GGGTCTTCAGGCACAT | | |
| | UGCA | | GCATCAGCTCTTC | | |
| TMPRSS | UCUGGGAC | 908 | TCTTGCTTTGGAGGTT | 1108 | mouse |
| 2_550 | AGCAACUG | | CTGGGACAGCAACTG | | |
| | UUCU | | TTCTACGTCTGAGA | | |
| TMPRSS | ACCUGCAU | 909 | TGCGACTCCTCAGGTA | 1109 | human |
| 2_545 | CAACCCCU | | CCTGCATCAACCCCTC | | |
| | CUAA | | TAACTGGTGTGAT | | |
| TMPRSS | CUUGCUUU | 910 | TGCTGTGGCTGCTGTC | 1110 | mouse |
| 2_536 | GGAGGUUC | | TTGCTTTGGAGGTTCT | | |
| | UGGG | | GGGACAGCAACTG | | |
| TMPRSS | AUGGGCAG | 911 | CTACTCTGGAAGTTCA | 1111 | human |
| 2_497 | CAAGUGCU | | TGGGCAGCAAGTGCT | | |
| | CCAA | | CCAACTCTGGGATA | | |
| TMPRSS | UAAGAAAU | 912 | GTGCACCTCAAAGTCT | 1112 | mouse |
| 2_470 | CGCUGUGU | | AAGAAATCGCTGTGTT | | |
| | UUAG | | TAGCCCTCGCCCT | | |
| TMPRSS | CUCAAAGU | 913 | AGGAGCACTGTGCAC | 1113 | mouse |
| 2_461 | CUAAGAAA | | CTCAAAGTCTAAGAA | | |
| | UCGC | | ATCGCTGTGTTTAGC | | |
| TMPRSS | UAAGAAAG | 914 | GTGCACCTCAAAGACT | 1114 | human |
| 2_415 | CACUGUGC | | AAGAAAGCACTGTGC | | |
| | AUCA | | ATCACCTTGACCCT | | |
| TMPRSS | CUCAACAU | 915 | GATTACAACGCAAGC | 1115 | mouse |
| 2_410 | CUGUCAUC | | CTCAACATCTGTCATC | | |
| | CACA | | CACACACATCCCAA | | |
| TMPRSS | AUCAUGCA | 916 | ATTGTGAAAATGAAT | 1116 | human |
| 2_3204 | AAUAAAUU | | ATCATGCAAATAAATT | | |
| | AUGC | | ATGCAATTTTTTTT | | |
| TMPRSS | UAUCAUGC | 917 | AATTGTGAAAATGAA | 1117 | human |
| 2_3203 | AAAUAAAU | | TATCATGCAAATAAAT | | |
| | UAUG | | TATGCAATTTTTTT | | |
| TMPRSS | GUGAAAAU | 918 | CTGTAAAGTTCAATTG | 1118 | human |
| 2_3192 | GAAUAUCA | | TGAAAATGAATATCAT | | |
| | UGCA | | GCAAATAAATTAT | | |
| TMPRSS | UUGUGAAA | 919 | AACTGTAAAGTTCAAT | 1119 | human |
| 2_3190 | AUGAAUAU | | TGTGAAAATGAATATC | | |
| | CAUG | | ATGCAAATAAATT | | |
| TMPRSS | UUCAAUUG | 920 | TTTTAAACTGTAAAGT | 1120 | human |
| 2_3185 | UGAAAAUG | | TCAATTGTGAAAATGA | | |
| | AAUA | | ATATCATGCAAAT | | |
| TMPRSS | GUUCAAUU | 921 | TTTTTAAACTGTAAAG | 1121 | human |
| 2_3184 | GUGAAAAU | | TTCAATTGTGAAAATG | | |
| | GAAU | | AATATCATGCAAA | | |
| TMPRSS | UGUAAAGU | 922 | GTATCTTTTTTAAACT | 1122 | human |
| 2_3178 | UCAAUUGU | | GTAAAGTTCAATTGTG | | |
| | GAAA | | AAAATGAATATCA | | |
| TMPRSS | AACUGUAA | 923 | TTTGTATCTTTTTTAA | 1123 | human |
| 2_3175 | AGUUCAAU | | ACTGTAAAGTTCAATT | | |
| | UGUG | | GTGAAAATGAATA | | |
| TMPRSS | UUAAACUG | 924 | TTTTTTGTATCTTTTTT | 1124 | human |
| 2_3172 | UAAAGUUC | | AAACTGTAAAGTTCA | | |
| | AAUU | | ATTGTGAAAATGA | | |
| TMPRSS | UUUAAACU | 925 | TTTTTTTGTATCTTTTT | 1125 | human |
| 2_3171 | GUAAAGUU | | TAAACTGTAAAGTTCA | | |
| | CAAU | | ATTGTGAAAATG | | |
| TMPRSS | GUGAACAA | 926 | CCCCTTCTTATTTATG | 1126 | human |
| 2_3139 | CUGUUUGU | | TGAACAACTGTTTGTC | | |
| | CUUU | | TTTTTTTGTATCT | | |
| TMPRSS | AUGUGAAC | 927 | TGCCCCTTCTTATTTA | 1127 | human |
| 2_3137 | AACUGUUU | | TGTGAACAACTGTTTG | | |
| | GUCU | | TCTTTTTTTGTAT | | |
| TMPRSS | UAUGUGAA | 928 | TTGCCCCTTCTTATTT | 1128 | human |
| 2_3136 | CAACUGUU | | ATGTGAACAACTGTTT | | |
| | UGUC | | GTCTTTTTTTGTA | | |
| TMPRSS | UUAUGUGA | 929 | ATTGCCCCTTCTTATT | 1129 | human |
| 2_3135 | ACAACUGU | | TATGTGAACAACTGTT | | |
| | UUGU | | TGTCTTTTTTTGT | | |
| TMPRSS | AUUUAUGU | 930 | TTATTGCCCCTTCTTA | 1130 | human |
| 2_3133 | GAACAACU | | TTTATGTGAACAACTG | | |
| | GUUU | | TTTGTCTTTTTTT | | |
| TMPRSS | AAAUAUAU | 931 | TGAGATTCCACTGTGA | 1131 | mouse |
| 2_3130 | GAAUAAAG | | AATATATGAATAAAG | | |
| | UAUA | | TATATAATTCTTTT | | |
| TMPRSS | UCUUAUUU | 932 | TTCTTTATTGCCCCTTC | 1132 | human |
| 2_3129 | AUGUGAAC | | TTATTTATGTGAACAA | | |
| | AACU | | CTGTTTGTCTTT | | |
| TMPRSS | AUUGCCCC | 933 | ACGTCTTCCTTCTTTA | 1133 | human |
| 2_3120 | UUCUUAUU | | TTGCCCCTTCTTATTT | | |
| | UAUG | | ATGTGAACAACTG | | |
| TMPRSS | GAUUCCAC | 934 | TGTTCTGAGCTGTGAG | 1134 | mouse |
| 2_3118 | UGUGAAAU | | ATTCCACTGTGAAATA | | |
| | AUAU | | TATGAATAAAGTA | | |
| TMPRSS | UCUGAGCU | 935 | CTGCTTTGTGTCTGTT | 1135 | mouse |
| 2_3106 | GUGAGAUU | | CTGAGCTGTGAGATTC | | |
| | CCAC | | CACTGTGAAATAT | | |
| TMPRSS | UGUGUCUG | 936 | GGTTATTTCCTGCTTT | 1136 | mouse |
| 2_3097 | UUCUGAGC | | GTGTCTGTTCTGAGCT | | |
| | UGUG | | GTGAGATTCCACT | | |
| TMPRSS | UAAUGGUG | 937 | TCCTAAAAGGTGTTGT | 1137 | human |
| 2_3094 | AAAACGUC | | AATGGTGAAAACGTC | | |
| | UUCC | | TTCCTTCTTTATTG | | |
| TMPRSS | GUAAUGGU | 938 | ATCCTAAAAGGTGTTG | 1138 | human |
| 2_3093 | GAAAACGU | | TAATGGTGAAAACGT | | |
| | CUUC | | CTTCCTTCTTTATT | | |
| TMPRSS | CCUGCUUU | 939 | GTTGGTTGGTTATTTC | 1139 | mouse |
| 2_3090 | GUGUCUGU | | CTGCTTTGTGTCTGTT | | |
| | UCUG | | CTGAGCTGTGAGA | | |
| TMPRSS | UUGGUUAU | 940 | TGTCTTTGCTGTTGGT | 1140 | mouse |
| 2_3080 | UUCCUGCU | | TGGTTATTTCCTGCTT | | |
| | UUGU | | TGTGTCTGTTCTG | | |
| TMPRSS | ACAUCCUA | 941 | CTTGCTCCCCAAGACA | 1141 | human |
| 2_3076 | AAAGGUGU | | CATCCTAAAAGGTGTT | | |
| | UGUA | | GTAATGGTGAAAA | | |
| TMPRSS | CUGUGCAC | 942 | ATTTGCAGGATCTGTC | 1142 | human |
| 2_2994 | AUGCCUCU | | TGTGCACATGCCTCTG | | |
| | GUAG | | TAGAGAGCAGCAT | | |
| TMPRSS | GCUGUAAG | 943 | GGGACCTTCTTAGATG | 1143 | mouse |
| 2_2988 | GUACCUAC | | CTGTAAGGTACCTACA | | |
| | AUAC | | TACAGACTAAATG | | |
| TMPRSS | UUUGCAGG | 944 | AGTCATGCAATCCCAT | 1144 | human |
| 2_2980 | AUCUGUCU | | TTGCAGGATCTGTCTG | | |
| | GUGC | | TGCACATGCCTCT | | |
| TMPRSS | AAUCCCAU | 945 | AATGGAAAGTCATGC | 1145 | human |
| 2_2973 | UUGCAGGA | | AATCCCATTTGCAGGA | | |
| | UCUG | | TCTGTCTGTGCACA | | |
| TMPRSS | GGGACCUU | 946 | CCTCATGCGTCCTCTG | 1146 | mouse |
| 2_2973 | CUUAGAUG | | GGACCTTCTTAGATGC | | |
| | CUGU | | TGTAAGGTACCTA | | |
| TMPRSS | UGGGACCU | 947 | CCCTCATGCGTCCTCT | 1147 | mouse |
| 2_2972 | UCUUAGAU | | GGGACCTTCTTAGATG | | |
| | GCUG | | CTGTAAGGTACCT | | |
| TMPRSS | UGGAAAGU | 948 | GACTTAACCTTGAAAT | 1148 | human |
| 2_2960 | CAUGCAAU | | GGAAAGTCATGCAAT | | |
| | CCCA | | CCCATTTGCAGGAT | | |
| TMPRSS | CCUUGAAA | 949 | ACAGCTAGGACTTAA | 1149 | human |
| 2_2952 | UGGAAAGU | | CCTTGAAATGGAAAG | | |
| | CAUG | | TCATGCAATCCCATT | | |
| TMPRSS | UACAGCUA | 950 | TGAAATGAATGATTCT | 1150 | human |
| 2_2936 | GGACUUAA | | ACAGCTAGGACTTAA | | |
| | CCUU | | CCTTGAAATGGAAA | | |
| TMPRSS | UUCUACAG | 951 | GAATGAAATGAATGA | 1151 | human |
| 2_2933 | CUAGGACU | | TTCTACAGCTAGGACT | | |
| | UAAC | | TAACCTTGAAATGG | | |
| TMPRSS | UGAAUGAU | 952 | TTTGCAAGAATGAAAT | 1152 | human |
| 2_2926 | UCUACAGC | | GAATGATTCTACAGCT | | |
| | UAGG | | AGGACTTAACCTT | | |
| TMPRSS | GUUUGCAA | 953 | TGGCCAAGCAGGCTG | 1153 | human |
| 2_2910 | GAAUGAAA | | GTTTGCAAGAATGAA | | |
| | UGAA | | ATGAATGATTCTACA | | |
| TMPRSS | CCAAGCAG | 954 | GGTTCTGCCTCCTGGC | 1154 | human |
| 2_2898 | GCUGGUUU | | CAAGCAGGCTGGTTTG | | |
| | GCAA | | CAAGAATGAAATG | | |
| TMPRSS | UGGGUCAU | 955 | TCAGAAGGCAGTGAA | 1155 | mouse |
| 2_2877 | AACUGGGA | | TGGGTCATAACTGGG | | |
| | CUCC | | ACTCCATCTTTGCTG | | |
| TMPRSS | ACCAAAUA | 956 | AGCCATGCCAGAATT | 1156 | mouse |
| 2_2796 | UGAAGUAU | | ACCAAATATGAAGTA | | |
| | GAAU | | TGAATGTCTTACCCA | | |
| TMPRSS | AUUACCAA | 957 | GAAAGCCATGCCAGA | 1157 | mouse |
| 2_2793 | AUAUGAAG | | ATTACCAAATATGAA | | |
| | UAUG | | GTATGAATGTCTTAC | | |
| TMPRSS | UGUGGUCC | 958 | TTGTTTTGGACTCTCT | 1158 | human |
| 2_2792 | CUUCCAAU | | GTGGTCCCTTCCAATG | | |
| | GCUG | | CTGTGGGTTTCCA | | |
| TMPRSS | GCCAGAAU | 959 | TACCAGGAAAGCCAT | 1159 | mouse |
| 2_2787 | UACCAAAU | | GCCAGAATTACCAAA | | |
| | AUGA | | TATGAAGTATGAATG | | |
| TMPRSS | UGCCAGAA | 960 | ATACCAGGAAAGCCA | 1160 | mouse |
| 2_2786 | UUACCAAA | | TGCCAGAATTACCAA | | |
| | UAUG | | ATATGAAGTATGAAT | | |
| TMPRSS | CAUGCCAG | 961 | TTATACCAGGAAAGC | 1161 | mouse |
| 2_2784 | AAUUACCA | | CATGCCAGAATTACCA | | |
| | AAUA | | AATATGAAGTATGA | | |
| TMPRSS | AAAGCCAU | 962 | TGGGTTTATACCAGGA | 1162 | mouse |
| 2_2779 | GCCAGAAU | | AAGCCATGCCAGAAT | | |
| | UACC | | TACCAAATATGAAG | | |
| TMPRSS | UAUACCAG | 963 | TTCTGGCCCTGGGTTT | 1163 | mouse |
| 2_2770 | GAAAGCCA | | ATACCAGGAAAGCCA | | |
| | UGCC | | TGCCAGAATTACCA | | |
| TMPRSS | GAAGAAGA | 964 | GCCCATGGTGGCGGC | 1164 | human |
| 2_2757 | GAAAGAUG | | GAAGAAGAGAAAGAT | | |
| | UGUU | | GTGTTTTGTTTTGGA | | |
| TMPRSS | CGGCGAAG | 965 | AAGTGCCCATGGTGG | 1165 | human |
| 2_2753 | AAGAGAAA | | CGGCGAAGAAGAGAA | | |
| | GAUG | | AGATGTGTTTTGTTT | | |
| TMPRSS | AGAGAGGA | 966 | TCAGATAAAGATGAA | 1166 | mouse |
| 2_2727 | GAUCAUUG | | AGAGAGGAGATCATT | | |
| | UCUU | | GTCTTCTGTCTTCTT | | |
| TMPRSS | UCAGAUAA | 967 | TAGAAGTTCCTAGCTT | 1167 | mouse |
| 2_2712 | AGAUGAAA | | CAGATAAAGATGAAA | | |
| | GAGA | | GAGAGGAGATCATT | | |
| TMPRSS | CCUAGCUU | 968 | ATGAGATTAGAAGTTC | 1168 | mouse |
| 2_2705 | CAGAUAAA | | CTAGCTTCAGATAAAG | | |
| | GAUG | | ATGAAAGAGAGGA | | |
| TMPRSS | CUCCUGAC | 969 | TGACAAAATGACTGG | 1169 | human |
| 2_2699 | UUAACGUU | | CTCCTGACTTAACGTT | | |
| | CUAU | | CTATAAATGAATGT | | |
| TMPRSS | GCUCCUGA | 970 | TTGACAAAATGACTG | 1170 | human |
| 2_2698 | CUUAACGU | | GCTCCTGACTTAACGT | | |
| | UCUA | | TCTATAAATGAATG | | |
| TMPRSS | GGCUCCUG | 971 | TTTGACAAAATGACTG | 1171 | human |
| 2_2697 | ACUUAACG | | GCTCCTGACTTAACGT | | |
| | UUCU | | TCTATAAATGAAT | | |
| TMPRSS | AUUAGAAG | 972 | TAGACTGGCAATGAG | 1172 | mouse |
| 2_2695 | UUCCUAGC | | ATTAGAAGTTCCTAGC | | |
| | UUCA | | TTCAGATAAAGATG | | |
| TMPRSS | AAUGAGAU | 973 | GTTCTGTAGACTGGCA | 1173 | mouse |
| 2_2689 | UAGAAGUU | | ATGAGATTAGAAGTTC | | |
| | CCUA | | CTAGCTTCAGATA | | |
| TMPRSS | GCAAUGAG | 974 | TTGTTCTGTAGACTGG | 1174 | mouse |
| 2_2687 | AUUAGAAG | | CAATGAGATTAGAAG | | |
| | UUCC | | TTCCTAGCTTCAGA | | |
| TMPRSS | UGACAAAA | 975 | CTATTTCAGCTGCTTT | 1175 | human |
| 2_2684 | UGACUGGC | | GACAAAATGACTGGC | | |
| | UCCU | | TCCTGACTTAACGT | | |
| TMPRSS | UUUGACAA | 976 | GCCTATTTCAGCTGCT | 1176 | human |
| 2_2682 | AAUGACUG | | TTGACAAAATGACTG | | |
| | GCUC | | GCTCCTGACTTAAC | | |
| TMPRSS | UAGGUUGU | 977 | CCTCTTCCAGATGGTT | 1177 | mouse |
| 2_2668 | UCUGUAGA | | AGGTTGTTCTGTAGAC | | |
| | CUGG | | TGGCAATGAGATT | | |
| TMPRSS | UUAGGUUG | 978 | ACCTCTTCCAGATGGT | 1178 | mouse |
| 2_2667 | UUCUGUAG | | TAGGTTGTTCTGTAGA | | |
| | ACUG | | CTGGCAATGAGAT | | |
| TMPRSS | UUCCAGAU | 979 | CAGACACTAGACCTCT | 1179 | mouse |
| 2_2657 | GGUUAGGU | | TCCAGATGGTTAGGTT | | |
| | UGUU | | GTTCTGTAGACTG | | |
| TMPRSS | AUCAUCUU | 980 | ACTCTTTGAAACTGTA | 1180 | human |
| 2_2641 | UGCCAAGU | | TCATCTTTGCCAAGTA | | |
| | AAGA | | AGAGTGGTGGCCT | | |
| TMPRSS | UCAGACAC | 981 | CTGTGTGATTGTGCCT | 1181 | mouse |
| 2_2641 | UAGACCUC | | CAGACACTAGACCTCT | | |
| | UUCC | | TCCAGATGGTTAG | | |
| TMPRSS | UGAAACUG | 982 | CTTCATTTAACTCTTT | 1182 | human |
| 2_2632 | UAUCAUCU | | GAAACTGTATCATCTT | | |
| | UUGC | | TGCCAAGTAAGAG | | |
| TMPRSS | UUUGAAAC | 983 | ACCTTCATTTAACTCT | 1183 | human |
| 2_2630 | UGUAUCAU | | TTGAAACTGTATCATC | | |
| | CUUU | | TTTGCCAAGTAAG | | |
| TMPRSS | AACUCUUU | 984 | AGTCCACCTTCATTTA | 1184 | human |
| 2_2625 | GAAACUGU | | ACTCTTTGAAACTGTA | | |
| | AUCA | | TCATCTTTGCCAA | | |
| TMPRSS | UUGGACUG | 985 | GGAGTTCACCTGCATT | 1185 | mouse |
| 2_2621 | UGUGAUUG | | TGGACTGTGTGATTGT | | |
| | UGCC | | GCCTCAGACACTA | | |
| TMPRSS | CCACCUUC | 986 | ATGTCTCCAAGTAGTC | 1186 | human |
| 2_2613 | AUUUAACU | | CACCTTCATTTAACTC | | |
| | CUUU | | TTTGAAACTGTAT | | |
| TMPRSS | UAGUCCAC | 987 | TTTGATGTCTCCAAGT | 1187 | human |
| 2_2609 | CUUCAUUU | | AGTCCACCTTCATTTA | | |
| | AACU | | ACTCTTTGAAACT | | |
| TMPRSS | UUUGAUGU | 988 | CCTGGAAACTTAGCTT | 1188 | human |
| 2_2594 | CUCCAAGU | | TTGATGTCTCCAAGTA | | |
| | AGUC | | GTCCACCTTCATT | | |
| TMPRSS | UUAGCUUU | 989 | AGTGCTCCTGGAAACT | 1189 | human |
| 2_2588 | UGAUGUCU | | TAGCTTTTGATGTCTC | | |
| | CCAA | | CAAGTAGTCCACC | | |
| TMPRSS | CCUGGAAA | 990 | TGCTACCTCAGTGCTC | 1190 | human |
| 2_2579 | CUUAGCUU | | CTGGAAACTTAGCTTT | | |
| | UUGA | | TGATGTCTCCAAG | | |
| TMPRSS | UACUACCU | 991 | TTGTGTTTCTTCTCTTA | 1191 | mouse |
| 2_2564 | CACUGCAC | | CTACCTCACTGCACCT | | |
| | CUGG | | GGACACTAGAGT | | |
| TMPRSS | UCUGGGUU | 992 | TTCAGTCACCTTGCTT | 1192 | mouse |
| 2_2543 | GUGUUUCU | | CTGGGTTGTGTTTCTT | | |
| | UCUC | | CTCTTACTACCTC | | |
| TMPRSS | UUUCCAUG | 993 | GTTTAAGGTACACTGT | 1193 | human |
| 2_2540 | UUAUGUUU | | TTCCATGTTATGTTTC | | |
| | CUAC | | TACACATTGCTAC | | |
| TMPRSS | UACACUGU | 994 | ATGCTCAGTTTAAGGT | 1194 | human |
| 2_2533 | UUCCAUGU | | ACACTGTTTCCATGTT | | |
| | UAUG | | ATGTTTCTACACA | | |
| TMPRSS | GUUUAAGG | 995 | AATCAAGGATGCTCA | 1195 | human |
| 2_2525 | UACACUGU | | GTTTAAGGTACACTGT | | |
| | UUCC | | TTCCATGTTATGTT | | |
| TMPRSS | AGUUUAAG | 996 | AAATCAAGGATGCTC | 1196 | human |
| 2_2524 | GUACACUG | | AGTTTAAGGTACACTG | | |
| | UUUC | | TTTCCATGTTATGT | | |
| TMPRSS | AUCAGAAU | 997 | TGGAGGCTCAGGTCC | 1197 | mouse |
| 2_2506 | CAGGGACU | | ATCAGAATCAGGGAC | | |
| | UGUG | | TTGTGATTTCAGTCA | | |
| TMPRSS | GGGGAAAU | 998 | AAATTGAGGTCCATG | 1198 | human |
| 2_2505 | CAAGGAUG | | GGGGAAATCAAGGAT | | |
| | CUCA | | GCTCAGTTTAAGGTA | | |
| TMPRSS | AGGUCCAU | 999 | ATCAAATGGAGGCTC | 1199 | mouse |
| 2_2500 | CAGAAUCA | | AGGTCCATCAGAATC | | |
| | GGGA | | AGGGACTTGTGATTT | | |
| TMPRSS | UCAGGUCC | 1000 | TAATCAAATGGAGGC | 1200 | mouse |
| 2_2498 | AUCAGAAU | | TCAGGTCCATCAGAAT | | |
| | CAGG | | CAGGGACTTGTGAT | | |
| TMPRSS | UGGAGCCU | 1001 | TGGCCTAGTACCTGAT | 1201 | mouse |
| 2_2463 | GUAUAGCU | | GGAGCCTGTATAGCTC | | |
| | CAGC | | AGCTAATCAAATG | | |
| TMPRSS | ACAGGCAU | 1002 | CTCTTAGCTTTGGCTA | 1202 | mouse |
| 2_2441 | GGCCUAGU | | CAGGCATGGCCTAGT | | |
| | ACCU | | ACCTGATGGAGCCT | | |
| TMPRSS | CCUGAAAC | 1003 | CTCAGCCTCTCAGAGC | 1203 | mouse |
| 2_2414 | UUACCUCU | | CTGAAACTTACCTCTT | | |
| | UAGC | | AGCTTTGGCTACA | | |
| TMPRSS | UCUCAGAG | 1004 | CTGTTTCTCTCAGCCT | 1204 | mouse |
| 2_2406 | CCUGAAAC | | CTCAGAGCCTGAAACT | | |
| | UUAC | | TACCTCTTAGCTT | | |
| TMPRSS | UGGGUGAG | 1005 | TGCCGGCATGTCCCTT | 1205 | mouse |
| 2_2341 | CUCUACAU | | GGGTGAGCTCTACATG | | |
| | GGUG | | GTGTTATTCAGTC | | |
| TMPRSS | AGAGCAAG | 1006 | CTAGGCAGATCTCTCA | 1206 | mouse |
| 2_2311 | AAGCUAAU | | GAGCAAGAAGCTAAT | | |
| | GCCG | | GCCGGCATGTCCCT | | |
| TMPRSS | UUCCCAAG | 1007 | AGGGTGATGGAGGCT | 1207 | mouse |
| 2_2280 | CUAAGGGC | | TTCCCAAGCTAAGGGC | | |
| | CUAG | | CTAGGCAGATCTCT | | |
| TMPRSS | AUAGACAG | 1008 | TTATGGGGTGAGAAT | 1208 | human |
| 2_2257 | UGCCCUUG | | ATAGACAGTGCCCTTG | | |
| | GUGC | | GTGCGAGGGAAGCA | | |
| TMPRSS | GGUGACGU | 1009 | CAGCCCTTCATGGGTG | 1209 | human |
| 2_2196 | GGUAGUCA | | GTGACGTGGTAGTCAC | | |
| | CUUG | | TTGTAAGGGGAAC | | |
| TMPRSS | UGGGCUGG | 1010 | ATCTGCTGTGCAGGTT | 1210 | mouse |
| 2_2165 | UCAUACUG | | GGGCTGGTCATACTGT | | |
| | UCAU | | CATGATTTCATTA | | |
| TMPRSS | GUUGGGCU | 1011 | AAATCTGCTGTGCAGG | 1211 | mouse |
| 2_2163 | GGUCAUAC | | TTGGGCTGGTCATACT | | |
| | UGUC | | GTCATGATTTCAT | | |
| TMPRSS | UGAGUAAC | 1012 | AAGGACTATGACCTCT | 1212 | mouse |
| 2_2047 | CUGAUGAC | | GAGTAACCTGATGAC | | |
| | CUGA | | CTGAGAAAGAGTAA | | |
| TMPRSS | GACCUCUG | 1013 | ATCACTAAGGACTATG | 1213 | mouse |
| 2_2041 | AGUAACCU | | ACCTCTGAGTAACCTG | | |
| | GAUG | | ATGACCTGAGAAA | | |
| TMPRSS | UGGAUCAC | 1014 | TGCTCAGGCCTTTTTT | 1214 | mouse |
| 2_2023 | UAAGGACU | | GGATCACTAAGGACT | | |
| | AUGA | | ATGACCTCTGAGTA | | |
| TMPRSS | UUGGAUCA | 1015 | ATGCTCAGGCCTTTTT | 1215 | mouse |
| 2_2022 | CUAAGGAC | | TGGATCACTAAGGACT | | |
| | UAUG | | ATGACCTCTGAGT | | |
| TMPRSS | ACUCUCAU | 1016 | GCAGAGGAGGGTGGC | 1216 | mouse |
| 2_1978 | GUUGGAAC | | ACTCTCATGTTGGAAC | | |
| | UUCU | | TTCTTTTGGGCTCA | | |
| TMPRSS | CUUUCCAG | 1017 | TCTTCCTGCTGAGTCC | 1217 | human |
| 2_1952 | GGGCCAAU | | TTTCCAGGGGCCAATT | | |
| | UUUG | | TTGGATGAGCATG | | |
| TMPRSS | ACCACCAG | 1018 | TTTGAACTCAGGGTCA | 1218 | human |
| 2_193 | CUAUUGGA | | CCACCAGCTATTGGAC | | |
| | CCUU | | CTTACTATGAAAA | | |
| TMPRSS | UGCCCCAU | 1019 | GAGAGGGGTGGAGGC | 1219 | human |
| 2_1924 | UGAGAUCU | | TGCCCCATTGAGATCT | | |
| | UCCU | | TCCTGCTGAGTCCT | | |
| TMPRSS | GAUGACCA | 1020 | GCTCCCACCAGAATG | 1220 | mouse |
| 2_1922 | GAUUCUGU | | GATGACCAGATTCTGT | | |
| | UGGG | | TGGGTTTGGGCACA | | |
| TMPRSS | CCCACCAG | 1021 | GCCACTTCTGCAGCTC | 1221 | mouse |
| 2_1910 | AAUGGAUG | | CCACCAGAATGGATG | | |
| | ACCA | | ACCAGATTCTGTTG | | |
| TMPRSS | UUCACUUU | 1022 | TGATTCGAAGGGCCTT | 1222 | mouse |
| 2_1821 | UAUUAAAC | | TCACTTTTATTAAACA | | |
| | AGUG | | GTGACTTGTTTGA | | |
| TMPRSS | UUUCACUU | 1023 | ATGATTCGAAGGGCCT | 1223 | mouse |
| 2_1820 | UUAUUAAA | | TTCACTTTTATTAAAC | | |
| | CAGU | | AGTGACTTGTTTG | | |
| TMPRSS | CGAAGGGC | 1024 | CCTTTTGAGATGATTC | 1224 | mouse |
| 2_1811 | CUUUCACU | | GAAGGGCCTTTCACTT | | |
| | UUUA | | TTATTAAACAGTG | | |
| TMPRSS | UUUGAGAU | 1025 | GTGCACAATGTACCTT | 1225 | mouse |
| 2_1799 | GAUUCGAA | | TTGAGATGATTCGAAG | | |
| | GGGC | | GGCCTTTCACTTT | | |
| TMPRSS | UGUACCUU | 1026 | ACTTCCTGTGCACAAT | 1226 | mouse |
| 2_1792 | UUGAGAUG | | GTACCTTTTGAGATGA | | |
| | AUUC | | TTCGAAGGGCCTT | | |
| TMPRSS | GUGCACAA | 1027 | GAATTTTAACTTCCTG | 1227 | mouse |
| 2_1784 | UGUACCUU | | TGCACAATGTACCTTT | | |
| | UUGA | | TGAGATGATTCGA | | |
| TMPRSS | CUGUGCAC | 1028 | CTGAATTTTAACTTCC | 1228 | mouse |
| 2_1782 | AAUGUACC | | TGTGCACAATGTACCT | | |
| | UUUU | | TTTGAGATGATTC | | |
| TMPRSS | CCUGAAUU | 1029 | CAAGAAAACCAAGGG | 1229 | mouse |
| 2_1766 | UUAACUUC | | CCTGAATTTTAACTTC | | |
| | CUGU | | CTGTGCACAATGTA | | |
| TMPRSS | UAAACAGU | 1030 | TCACTTCATTTTTATT | 1230 | human |
| 2_1764 | GAACUUGU | | AAACAGTGAACTTGTC | | |
| | CUGG | | TGGCTTTGGCACT | | |
| TMPRSS | UUAAACAG | 1031 | GTCACTTCATTTTTAT | 1231 | human |
| 2_1763 | UGAACUUG | | TAAACAGTGAACTTGT | | |
| | UCUG | | CTGGCTTTGGCAC | | |
| TMPRSS | AGGGCCUG | 1032 | TCTGCAAGAAAACCA | 1232 | mouse |
| 2_1762 | AAUUUUAA | | AGGGCCTGAATTTTAA | | |
| | CUUC | | CTTCCTGTGCACAA | | |
| TMPRSS | AAGGGCCU | 1033 | TTCTGCAAGAAAACC | 1233 | mouse |
| 2_1761 | GAAUUUUA | | AAGGGCCTGAATTTTA | | |
| | ACUU | | ACTTCCTGTGCACA | | |
| TMPRSS | CAAGAAAA | 1034 | TTCAACAACCTTCTGC | 1234 | mouse |
| 2_1751 | CCAAGGGC | | AAGAAAACCAAGGGC | | |
| | CUGA | | CTGAATTTTAACTT | | |
| TMPRSS | UGCAAGAA | 1035 | TCTTCAACAACCTTCT | 1235 | mouse |
| 2_1749 | AACCAAGG | | GCAAGAAAACCAAGG | | |
| | GCCU | | GCCTGAATTTTAAC | | |
| TMPRSS | CUGCAAGA | 1036 | GTCTTCAACAACCTTC | 1236 | mouse |
| 2_1748 | AAACCAAG | | TGCAAGAAAACCAAG | | |
| | GGCC | | GGCCTGAATTTTAA | | |
| TMPRSS | UUCUGCAA | 1037 | TTGTCTTCAACAACCT | 1237 | mouse |
| 2_1746 | GAAAACCA | | TCTGCAAGAAAACCA | | |
| | AGGG | | AGGGCCTGAATTTT | | |
| TMPRSS | AUUCAGAG | 1038 | TTACTCTTAGAGATGA | 1238 | human |
| 2_1740 | GUCACUUC | | TTCAGAGGTCACTTCA | | |
| | AUUU | | TTTTTATTAAACA | | |
| TMPRSS | UGAUUCAG | 1039 | ATTTACTCTTAGAGAT | 1239 | human |
| 2_1738 | AGGUCACU | | GATTCAGAGGTCACTT | | |
| | UCAU | | CATTTTTATTAAA | | |
| TMPRSS | UUAGAGAU | 1040 | GTGCATGATTTACTCT | 1240 | human |
| 2_1731 | GAUUCAGA | | TAGAGATGATTCAGA | | |
| | GGUC | | GGTCACTTCATTTT | | |
| TMPRSS | UUUACUCU | 1041 | CTTCCCCGTGCATGAT | 1241 | human |
| 2_1724 | UAGAGAUG | | TTACTCTTAGAGATGA | | |
| | AUUC | | TTCAGAGGTCACT | | |
| TMPRSS | UGUCCCAG | 1042 | TAATCCACGTGGCTTT | 1242 | mouse |
| 2_1716 | ACUUCCUU | | GTCCCAGACTTCCTTT | | |
| | UGUC | | GTCTTCAACAACC | | |
| TMPRSS | CCGUGCAU | 1043 | GCTGGTTTTGCTTCCC | 1243 | human |
| 2_1714 | GAUUUACU | | CGTGCATGATTTACTC | | |
| | CUUA | | TTAGAGATGATTC | | |
| TMPRSS | GGCUUUGU | 1044 | ACAGCTAATCCACGTG | 1244 | mouse |
| 2_1711 | CCCAGACU | | GCTTTGTCCCAGACTT | | |
| | UCCU | | CCTTTGTCTTCAA | | |
| TMPRSS | UUCCCCGU | 1045 | TGGGGCTGGTTTTGCT | 1245 | human |
| 2_1710 | GCAUGAUU | | TCCCCGTGCATGATTT | | |
| | UACU | | ACTCTTAGAGATG | | |
| TMPRSS | UUACAAGA | 1046 | GTCCTTGACGTCGTTT | 1246 | human |
| 2_1681 | AAACAAUG | | TACAAGAAAACAATG | | |
| | GGGC | | GGGCTGGTTTTGCT | | |
| TMPRSS | UUUACAAG | 1047 | CGTCCTTGACGTCGTT | 1247 | human |
| 2_1680 | AAAACAAU | | TTACAAGAAAACAAT | | |
| | GGGG | | GGGGCTGGTTTTGC | | |
| TMPRSS | UUUUACAA | 1048 | TCGTCCTTGACGTCGT | 1248 | human |
| 2_1679 | GAAAACAA | | TTTACAAGAAAACAA | | |
| | UGGG | | TGGGGCTGGTTTTG | | |
| TMPRSS | UUCGUCCU | 1049 | CTAATCCACATGGTCT | 1249 | human |
| 2_1663 | UGACGUCG | | TCGTCCTTGACGTCGT | | |
| | UUUU | | TTTACAAGAAAAC | | |
| TMPRSS | ACGGUAUU | 1050 | GTATACGGGAACGTG | 1250 | mouse |
| 2_1656 | UACAGAUU | | ACGGTATTTACAGATT | | |
| | GGAU | | GGATCTACCAGCAA | | |
| TMPRSS | GACGGUAU | 1051 | AGTATACGGGAACGT | 1251 | mouse |
| 2_1655 | UUACAGAU | | GACGGTATTTACAGAT | | |
| | UGGA | | TGGATCTACCAGCA | | |
| TMPRSS | ACGGGAAC | 1052 | TCAGACCTGGAGTATA | 1252 | mouse |
| 2_1645 | GUGACGGU | | CGGGAACGTGACGGT | | |
| | AUUU | | ATTTACAGATTGGA | | |
| TMPRSS | AUGGUAUU | 1053 | GTGTACGGGAATGTG | 1253 | human |
| 2_1604 | CACGGACU | | ATGGTATTCACGGACT | | |
| | GGAU | | GGATTTATCGACAA | | |
| TMPRSS | GAUGGUAU | 1054 | AGTGTACGGGAATGT | 1254 | human |
| 2_1603 | UCACGGAC | | GATGGTATTCACGGAC | | |
| | UGGA | | TGGATTTATCGACA | | |
| TMPRSS | GGGAAUGU | 1055 | AGACCAGGAGTGTAC | 1255 | human |
| 2_1595 | GAUGGUAU | | GGGAATGTGATGGTA | | |
| | UCAC | | TTCACGGACTGGATT | | |
| TMPRSS | ACGGGAAU | 1056 | ACAGACCAGGAGTGT | 1256 | human |
| 2_1593 | GUGAUGGU | | ACGGGAATGTGATGG | | |
| | AUUC | | TATTCACGGACTGGA | | |
| TMPRSS | GUUGAUAA | 1057 | TCATTACTCGATGCTG | 1257 | human |
| 2_158 | CAGCAAGA | | TTGATAACAGCAAGA | | |
| | UGGC | | TGGCTTTGAACTCA | | |
| TMPRSS | CUGUUGAU | 1058 | TATCATTACTCGATGC | 1258 | human |
| 2_156 | AACAGCAA | | TGTTGATAACAGCAA | | |
| | GAUG | | GATGGCTTTGAACT | | |
| TMPRSS | UCUGGCUG | 1059 | GATACAAGCTGGGGT | 1259 | human |
| 2_1559 | UGCCAAAG | | TCTGGCTGTGCCAAAG | | |
| | CUUA | | CTTACAGACCAGGA | | |
| TMPRSS | GGUUACUU | 1060 | CAGTGGAGGGCCGCT | 1260 | mouse |
| 2_1559 | UGAAGAAU | | GGTTACTTTGAAGAAT | | |
| | GGGA | | GGGATCTGGTGGCT | | |
| TMPRSS | UGUAAUAG | 1061 | ATCGAGCCCTCCAAAT | 1261 | mouse |
| 2_1452 | UAAAUACA | | GTAATAGTAAATACAT | | |
| | UAUA | | ATACAACAACCTA | | |
| TMPRSS | CCAAAUGU | 1062 | CCTTGATCGAGCCCTC | 1262 | mouse |
| 2_1447 | AAUAGUAA | | CAAATGTAATAGTAA | | |
| | AUAC | | ATACATATACAACA | | |
| TMPRSS | CUCCAAAU | 1063 | ACCCTTGATCGAGCCC | 1263 | mouse |
| 2_1445 | GUAAUAGU | | TCCAAATGTAATAGTA | | |
| | AAAU | | AATACATATACAA | | |
| TMPRSS | CGAGCCCU | 1064 | CATGGTACCCTTGATC | 1264 | mouse |
| 2_1439 | CCAAAUGU | | GAGCCCTCCAAATGTA | | |
| | AAUA | | ATAGTAAATACAT | | |
| TMPRSS | GAUCGAGC | 1065 | TGCCATGGTACCCTTG | 1265 | mouse |
| 2_1436 | CCUCCAAA | | ATCGAGCCCTCCAAAT | | |
| | UGUA | | GTAATAGTAAATA | | |
| TMPRSS | AUGUCUAU | 1066 | GATGCAACAGCAGAT | 1266 | human |
| 2_1413 | GACAACCU | | ATGTCTATGACAACCT | | |
| | GAUC | | GATCACACCAGCCA | | |
| TMPRSS | UCGGACGU | 1067 | GAGAAAGGGAAGACC | 1267 | mouse |
| 2_1404 | GUUGAAUG | | TCGGACGTGTTGAATG | | |
| | CUGC | | CTGCCATGGTACCC | | |
| TMPRSS | AACAGCAG | 1068 | GAGACACAGAGATGC | 1268 | human |
| 2_1403 | AUAUGUCU | | AACAGCAGATATGTCT | | |
| | AUGA | | ATGACAACCTGATC | | |
| TMPRSS | CUCGGACG | 1069 | TGAGAAAGGGAAGAC | 1269 | mouse |
| 2_1403 | UGUUGAAU | | CTCGGACGTGTTGAAT | | |
| | GCUG | | GCTGCCATGGTACC | | |
| TMPRSS | AGAUGCAA | 1070 | CTCATTGAGACACAG | 1270 | human |
| 2_1397 | CAGCAGAU | | AGATGCAACAGCAGA | | |
| | AUGU | | TATGTCTATGACAAC | | |
| TMPRSS | UGAGAAAG | 1071 | GTGGGGGGCCACCTA | 1271 | mouse |
| 2_1388 | GGAAGACC | | TGAGAAAGGGAAGAC | | |
| | UCGG | | CTCGGACGTGTTGAA | | |
| TMPRSS | AUACCUAU | 1072 | TATTGAACATTCCAGA | 1272 | human |
| 2_136 | CAUUACUC | | TACCTATCATTACTCG | | |
| | GAUG | | ATGCTGTTGATAA | | |
| TMPRSS | UCAGAAGU | 1073 | GAGAAAGGGAAGACC | 1273 | human |
| 2_1352 | GCUGAACG | | TCAGAAGTGCTGAAC | | |
| | CUGC | | GCTGCCAAGGTGCTT | | |
| TMPRSS | CUCAGAAG | 1074 | GGAGAAAGGGAAGAC | 1274 | human |
| 2_1351 | UGCUGAAC | | CTCAGAAGTGCTGAA | | |
| | GCUG | | CGCTGCCAAGGTGCT | | |
| TMPRSS | CCAGAUAC | 1075 | GTCATATTGAACATTC | 1275 | human |
| 2_132 | CUAUCAUU | | CAGATACCTATCATTA | | |
| | ACUC | | CTCGATGCTGTTG | | |
| TMPRSS | UCCAGAUA | 1076 | GGTCATATTGAACATT | 1276 | human |
| 2_131 | CCUAUCAU | | CCAGATACCTATCATT | | |
| | UACU | | ACTCGATGCTGTT | | |
| TMPRSS | UUGGCUUU | 1077 | AAGCTGCAGACACCTT | 1277 | mouse |
| 2_1287 | UAAUGAUC | | TGGCTTTTAATGATCT | | |
| | UAGU | | AGTGAAGCCAGTG | | |
| TMPRSS | UGAAGCUG | 1078 | ACGACATTGCTCTCAT | 1278 | mouse |
| 2_1270 | CAGACACC | | GAAGCTGCAGACACC | | |
| | UUUG | | TTTGGCTTTTAATG | | |
| TMPRSS | AACGACAU | 1079 | TCTAAGACCAAGAAT | 1279 | mouse |
| 2_1254 | UGCUCUCA | | AACGACATTGCTCTCA | | |
| | UGAA | | TGAAGCTGCAGACA | | |
| TMPRSS | GCAGAAGC | 1080 | TGCGCTGATGAAGCTG | 1280 | human |
| 2_1225 | CUCUGACU | | CAGAAGCCTCTGACTT | | |
| | UUCA | | TCAACGACCTAGT | | |
| TMPRSS | UUCCCAUC | 1081 | GGTAGAAAAAGTAAT | 1281 | mouse |
| 2_1220 | CAAAUUAC | | TTCCCATCCAAATTAC | | |
| | GACU | | GACTCTAAGACCAA | | |
| TMPRSS | GGAAGUAG | 1082 | TCTCTCATGTTCTATG | 1282 | mouse |
| 2_1191 | ACACCAGG | | GAAGTAGACACCAGG | | |
| | UAGA | | TAGAAAAAGTAATT | | |
| TMPRSS | UGGAAGUA | 1083 | GTCTCTCATGTTCTAT | 1283 | mouse |
| 2_1190 | GACACCAG | | GGAAGTAGACACCAG | | |
| | GUAG | | GTAGAAAAAGTAAT | | |
| TMPRSS | UGUUCUAU | 1084 | TGAGACAGTCTCTCAT | 1284 | mouse |
| 2_1183 | GGAAGUAG | | GTTCTATGGAAGTAGA | | |
| | ACAC | | CACCAGGTAGAAA | | |
| TMPRSS | UAUGACUC | 1085 | ATTTCTCATCCAAATT | 1285 | human |
| 2_1181 | CAAGACCA | | ATGACTCCAAGACCA | | |
| | AGAA | | AGAACAATGACATT | | |
| TMPRSS | UUCUCAUC | 1086 | AGTAGAAAAAGTGAT | 1286 | human |
| 2_1168 | CAAAUUAU | | TTCTCATCCAAATTAT | | |
| | GACU | | GACTCCAAGACCAA | | |
| TMPRSS | UGAGACAG | 1087 | CATTTGCGGGAATTCT | 1287 | mouse |
| 2_1168 | UCUCUCAU | | GAGACAGTCTCTCATG | | |
| | GUUC | | TTCTATGGAAGTA | | |
| TMPRSS | CUGAGACA | 1088 | GCATTTGCGGGAATTC | 1288 | mouse |
| 2_1167 | GUCUCUCA | | TGAGACAGTCTCTCAT | | |
| | UGUU | | GTTCTATGGAAGT | | |
| TMPRSS | UGCGGGAA | 1089 | GTACTGGACGGCATTT | 1289 | mouse |
| 2_1157 | UUCUGAGA | | GCGGGAATTCTGAGA | | |
| | CAGU | | CAGTCTCTCATGTT | | |
| TMPRSS | CAGGUCAU | 1090 | CCGCCTGGAGCGCGG | 1290 | human |
| 2_114 | AUUGAACA | | CAGGTCATATTGAACA | | |
| | UUCC | | TTCCAGATACCTAT | | |
| TMPRSS | GAGACAAU | 1091 | ATTTGCGGGGATTTTG | 1291 | human |
| 2_1117 | CUUUCAUG | | AGACAATCTTTCATGT | | |
| | UUCU | | TCTATGGAGCCGG | | |
| TMPRSS | CGCGGCAG | 1092 | GAGCGCCGCCTGGAG | 1292 | human |
| 2_109 | GUCAUAUU | | CGCGGCAGGTCATATT | | |
| | GAAC | | GAACATTCCAGATA | | |
| TMPRSS | AUGGCAUU | 1093 | ACCTCTTAACAATCCA | 1293 | human |
| 2_1087 | GGACGGCA | | TGGCATTGGACGGCAT | | |
| | UUUG | | TTGCGGGGATTTT | | |
| TMPRSS | CAUGGCAU | 1094 | AACCTCTTAACAATCC | 1294 | human |
| 2_1086 | UGGACGGC | | ATGGCATTGGACGGC | | |
| | AUUU | | ATTTGCGGGGATTT | | |

TABLE 11B
Host target IL-6 - 20 nucleotide targets and 45 nucleotide gene
target regions

| | | SEQ | | SEQ | |
|---|---|---|---|---|---|
| SEQUENCE | | ID | | ID | |
| ID | 20 nt Sequence | NO: | 45 nt Gene Region | NO: | Species |
| IL6_999 | UUGUAUUU | 1295 | AAAGAAATATTTATATTG | 1495 | human |
| | AUAUAAUG | | TATTTATATAATGTATAAA | | |
| | UAUA | | TGGTTTTT | | |
| IL6_998 | AUUGUAUU | 1296 | TAAAGAAATATTTATATT | 1496 | human |
| | UAUAUAAU | | GTATTTATATAATGTATAA | | |
| | GUAU | | ATGGTTTT | | |
| IL6_995 | UAUAUUGU | 1297 | TTTTAAAGAAATATTTATA | 1497 | human |
| | AUUUAUAU | | TTGTATTTATATAATGTAT | | |
| | AAUG | | AAATGGT | | |
| IL6_994 | UUAUAUUG | 1298 | TTTTTAAAGAAATATTTAT | 1498 | human |
| | UAUUUAUA | | ATTGTATTTATATAATGTA | | |
| | UAAU | | TAAATGG | | |
| IL6_989 | AAUAUUUA | 1299 | ACATATTTTTAAAGAAAT | 1499 | human |
| | UAUUGUAU | | ATTTATATTGTATTTATAT | | |
| | UUAU | | AATGTATA | | |
| IL6_984 | AAAGAAAU | 1300 | CTTATACATATTTTTAAAG | 1500 | human |
| | AUUUAUAU | | AAATATTTATATTGTATTT | | |
| | UGUA | | ATATAAT | | |
| IL6_982 | UUAAAGAA | 1301 | AACTTATACATATTTTTAA | 1501 | human |
| | AUAUUUAU | | AGAAATATTTATATTGTAT | | |
| | AUUG | | TTATATA | | |
| IL6_980 | UUUUAAAG | 1302 | CTAACTTATACATATTTTT | 1502 | human |
| | AAAUAUUU | | AAAGAAATATTTATATTG | | |
| | AUAU | | TATTTATA | | |
| IL6_963 | GGCUAACUU | 1303 | TTACCTCAAATAAATGGC | 1503 | human |
| | AUACAUAUU | | TAACTTATACATATTTTTA | | |
| | UU | | AAGAAATA | | |
| IL6_962 | UGGCUAACU | 1304 | CTTACCTCAAATAAATGG | 1504 | human |
| | UAUACAUAU | | CTAACTTATACATATTTTT | | |
| | UU | | AAAGAAAT | | |
| IL6_955 | AAAUAAAU | 1305 | GTGTAGGCTTACCTCAAA | 1505 | human |
| | GGCUAACUU | | TAAATGGCTAACTTATAC | | |
| | AUA | | ATATTTTTA | | |
| IL6_951 | CCUCAAAUA | 1306 | GAAAGTGTAGGCTTACCT | 1506 | human |
| | AAUGGCUAA | | CAAATAAATGGCTAACTT | | |
| | CU | | ATACATATT | | |
| IL6_950 | ACCUCAAAU | 1307 | GGAAAGTGTAGGCTTACC | 1507 | human |
| | AAAUGGCUA | | TCAAATAAATGGCTAACT | | |
| | AC | | TATACATAT | | |
| IL6_949 | UACCUCAAA | 1308 | TGGAAAGTGTAGGCTTAC | 1508 | human |
| | UAAAUGGCU | | CTCAAATAAATGGCTAAC | | |
| | AA | | TTATACATA | | |
| IL6_948 | UUACCUCAA | 1309 | TTGGAAAGTGTAGGCTTA | 1509 | human |
| | AUAAAUGGC | | CCTCAAATAAATGGCTAA | | |
| | UA | | CTTATACAT | | |
| IL6_947 | CUUACCUCA | 1310 | CTTGGAAAGTGTAGGCTT | 1510 | human |
| | AAUAAAUG | | ACCTCAAATAAATGGCTA | | |
| | GCU | | ACTTATACA | | |
| IL6_943 | UAGGCUUAC | 1311 | ATTTCTTGGAAAGTGTAG | 1511 | human |
| | CUCAAAUAA | | GCTTACCTCAAATAAATG | | |
| | AU | | GCTAACTTA | | |
| IL6_934 | UGGAAAGU | 1312 | AGCCAGATCATTTCTTGG | 1512 | human |
| | GUAGGCUUA | | AAAGTGTAGGCTTACCTC | | |
| | CCU | | AAATAAATG | | |
| IL6_932 | CUUGGAAAG | 1313 | AGAGCCAGATCATTTCTT | 1513 | human |
| | UGUAGGCUU | | GGAAAGTGTAGGCTTACC | | |
| | AC | | TCAAATAAA | | |
| IL6_917 | AGAGCCAGA | 1314 | AATATCCTTTGTTTCAGAG | 1514 | human |
| | UCAUUUCUU | | CCAGATCATTTCTTGGAA | | |
| | GG | | AGTGTAGG | | |
| IL6_912 | GUUUCAGAG | 1315 | GTTTGAATATCCTTTGTTT | 1515 | human |
| | CCAGAUCAU | | CAGAGCCAGATCATTTCTT | | |
| | UU | | GGAAAGT | | |
| IL6_894 | GCAGUUUGA | 1316 | ATGGAAAGTGGCTATGCA | 1516 | human |
| | AUAUCCUUU | | GTTTGAATATCCTTTGTTT | | |
| | GU | | CAGAGCCA | | |
| IL6_878 | AAUGGAAA | 1317 | TAGTTTTGAAATAATAAT | 1517 | human |
| | GUGGCUAUG | | GGAAAGTGGCTATGCAGT | | |
| | CAG | | TTGAATATC | | |
| IL6_870 | GAAAUAAU | 1318 | TTATGTATTAGTTTTGAAA | 1518 | human |
| | AAUGGAAA | | TAATAATGGAAAGTGGCT | | |
| | GUGG | | ATGCAGTT | | |
| IL6_867 | UUUGAAAU | 1319 | ATTTTATGTATTAGTTTTG | 1519 | human |
| | AAUAAUGG | | AAATAATAATGGAAAGTG | | |
| | AAAG | | GCTATGCA | | |
| IL6_858 | UGUAUUAG | 1320 | ACTTGAAACATTTTATGTA | 1520 | human |
| | UUUUGAAA | | TTAGTTTTGAAATAATAAT | | |
| | UAAU | | GGAAAGT | | |
| IL6_856 | UAUGUAUU | 1321 | CCACTTGAAACATTTTATG | 1521 | human |
| | AGUUUUGA | | TATTAGTTTTGAAATAATA | | |
| | AAUA | | ATGGAAA | | |
| IL6_851 | CAUUUUAUG | 1322 | AAGTACCACTTGAAACAT | 1522 | human |
| | UAUUAGUU | | TTTATGTATTAGTTTTGAA | | |
| | UUG | | ATAATAAT | | |
| IL6_843 | ACUUGAAAC | 1323 | TTTTTAAGAAGTACCACTT | 1523 | human |
| | AUUUUAUG | | GAAACATTTTATGTATTAG | | |
| | UAU | | TTTTGAA | | |
| IL6_840 | ACCACUUGA | 1324 | ATATTTTTAAGAAGTACC | 1524 | human |
| | AACAUUUUA | | ACTTGAAACATTTTATGTA | | |
| | UG | | TTAGTTTT | | |
| IL6_839 | UACCACUUG | 1325 | TATATTTTTAAGAAGTACC | 1525 | human |
| | AAACAUUUU | | ACTTGAAACATTTTATGTA | | |
| | AU | | TTAGTTT | | |
| IL6_838 | GUACCACUU | 1326 | TTATATTTTTAAGAAGTAC | 1526 | human |
| | GAAACAUUU | | CACTTGAAACATTTTATGT | | |
| | UA | | ATTAGTT | | |
| IL6_831 | UUAAGAAG | 1327 | GTCATATTTATATTTTTAA | 1527 | human |
| | UACCACUUG | | GAAGTACCACTTGAAACA | | |
| | AAA | | TTTTATGT | | |
| IL6_830 | UUUAAGAA | 1328 | AGTCATATTTATATTTTTA | 1528 | human |
| | GUACCACUU | | AGAAGTACCACTTGAAAC | | |
| | GAA | | ATTTTATG | | |
| IL6_829 | UUUUAAGA | 1329 | AAGTCATATTTATATTTTT | 1529 | human |
| | AGUACCACU | | AAGAAGTACCACTTGAAA | | |
| | UGA | | CATTTTAT | | |
| IL6_809 | UAUGUAAG | 1330 | GAAGCTGAGTTAATTTAT | 1530 | human |
| | UCAUAUUUA | | GTAAGTCATATTTATATTT | | |
| | UAU | | TTAAGAAG | | |
| IL6_808 | UUAUGUAA | 1331 | TGAAGCTGAGTTAATTTAT | 1531 | human |
| | GUCAUAUUU | | GTAAGTCATATTTATATTT | | |
| | AUA | | TTAAGAA | | |
| IL6_805 | AAUUUAUG | 1332 | ATGTGAAGCTGAGTTAAT | 1532 | human |
| | UAAGUCAUA | | TTATGTAAGTCATATTTAT | | |
| | UUU | | ATTTTTAA | | |
| IL6_804 | UAAUUUAU | 1333 | TATGTGAAGCTGAGTTAA | 1533 | human |
| | GUAAGUCAU | | TTTATGTAAGTCATATTTA | | |
| | AUU | | TATTTTTA | | |
| IL6_803 | UUAAUUUA | 1334 | ATATGTGAAGCTGAGTTA | 1534 | human |
| | UGUAAGUCA | | ATTTATGTAAGTCATATTT | | |
| | UAU | | ATATTTTT | | |
| IL6_801 | AGUUAAUU | 1335 | AAATATGTGAAGCTGAGT | 1535 | human |
| | UAUGUAAG | | TAATTTATGTAAGTCATAT | | |
| | UCAU | | TTATATTT | | |
| IL6_800 | GAGUUAAU | 1336 | TAAATATGTGAAGCTGAG | 1536 | human |
| | UUAUGUAA | | TTAATTTATGTAAGTCATA | | |
| | GUCA | | TTTATATT | | |
| IL6_799 | UGAGUUAA | 1337 | TTAAATATGTGAAGCTGA | 1537 | human |
| | UUUAUGUA | | GTTAATTTATGTAAGTCAT | | |
| | AGUC | | ATTTATAT | | |
| IL6_798 | CUGAGUUAA | 1338 | TTTAAATATGTGAAGCTG | 1538 | human |
| | UUUAUGUA | | AGTTAATTTATGTAAGTCA | | |
| | AGU | | TATTTATA | | |
| IL6_794 | GAAGCUGAG | 1339 | AATATTTAAATATGTGAA | 1539 | human |
| | UUAAUUUA | | GCTGAGTTAATTTATGTAA | | |
| | UGU | | GTCATATT | | |
| IL6_793 | UGAAGCUGA | 1340 | TAATATTTAAATATGTGA | 1540 | human |
| | GUUAAUUU | | AGCTGAGTTAATTTATGTA | | |
| | AUG | | AGTCATAT | | |
| IL6_792 | GUGAAGCUG | 1341 | TTAATATTTAAATATGTGA | 1541 | human |
| | AGUUAAUU | | AGCTGAGTTAATTTATGTA | | |
| | UAU | | AGTCATA | | |
| IL6_790 | AUGUGAAGC | 1342 | TATTAATATTTAAATATGT | 1542 | human |
| | UGAGUUAA | | GAAGCTGAGTTAATTTAT | | |
| | UUU | | GTAAGTCA | | |
| IL6_788 | AUAUGUGA | 1343 | TTTATTAATATTTAAATAT | 1543 | human |
| | AGCUGAGUU | | GTGAAGCTGAGTTAATTT | | |
| | AAU | | ATGTAAGT | | |
| IL6_784 | UUAAAUAU | 1344 | TTAATTTATTAATATTTAA | 1544 | human |
| | GUGAAGCUG | | ATATGTGAAGCTGAGTTA | | |
| | AGU | | ATTTATGT | | |
| IL6_783 | UUUAAAUA | 1345 | TTTAATTTATTAATATTTA | 1545 | human |
| | UGUGAAGCU | | AATATGTGAAGCTGAGTT | | |
| | GAG | | AATTTATG | | |
| IL6_782 | AUUUAAAU | 1346 | TTTTAATTTATTAATATTT | 1546 | human |
| | AUGUGAAGC | | AAATATGTGAAGCTGAGT | | |
| | UGA | | TAATTTAT | | |
| IL6_778 | UAAUAUUU | 1347 | TTATTTTTAATTTATTAAT | 1547 | human |
| | AAAUAUGU | | ATTTAAATATGTGAAGCT | | |
| | GAAG | | GAGTTAAT | | |
| IL6_776 | AUUAAUAU | 1348 | AATTATTTTTAATTTATTA | 1548 | human |
| | UUAAAUAU | | ATATTTAAATATGTGAAG | | |
| | GUGA | | CTGAGTTA | | |
| IL6_774 | UUAUUAAU | 1349 | TTAATTATTTTTAATTTAT | 1549 | human |
| | AUUUAAAU | | TAATATTTAAATATGTGA | | |
| | AUGU | | AGCTGAGT | | |
| IL6_770 | UAAUUUAU | 1350 | TATTTTAATTATTTTTAAT | 1550 | human |
| | UAAUAUUU | | TTATTAATATTTAAATATG | | |
| | AAAU | | TGAAGCT | | |
| IL6_768 | UUUAAUUU | 1351 | ACTATTTTAATTATTTTTA | 1551 | human |
| | AUUAAUAU | | ATTTATTAATATTTAAATA | | |
| | UUAA | | TGTGAAG | | |
| IL6_747 | UAGGACACU | 1352 | TAAAAGTATGAGCGTTAG | 1552 | human |
| | AUUUUAAU | | GACACTATTTTAATTATTT | | |
| | UAU | | TTAATTTA | | |
| IL6_746 | UUAGGACAC | 1353 | CTAAAAGTATGAGCGTTA | 1553 | human |
| | UAUUUUAA | | GGACACTATTTTAATTATT | | |
| | UUA | | TTTAATTT | | |
| IL6_745 | GUUAGGACA | 1354 | ACTAAAAGTATGAGCGTT | 1554 | human |
| | CUAUUUUAA | | AGGACACTATTTTAATTAT | | |
| | UU | | TTTTAATT | | |
| IL6_743 | GCGUUAGGA | 1355 | GAACTAAAAGTATGAGCG | 1555 | human |
| | CACUAUUUU | | TTAGGACACTATTTTAATT | | |
| | AA | | ATTTTTAA | | |
| IL6_742 | AGCGUUAGG | 1356 | AGAACTAAAAGTATGAGC | 1556 | human |
| | ACACUAUUU | | GTTAGGACACTATTTTAAT | | |
| | UA | | TATTTTTA | | |
| IL6_741 | GAGCGUUAG | 1357 | GAGAACTAAAAGTATGAG | 1557 | human |
| | GACACUAUU | | CGTTAGGACACTATTTTAA | | |
| | UU | | TTATTTTT | | |
| IL6_740 | UGAGCGUUA | 1358 | GGAGAACTAAAAGTATGA | 1558 | human |
| | GGACACUAU | | GCGTTAGGACACTATTTTA | | |
| | UU | | ATTATTTT | | |
| IL6_739 | AUGAGCGUU | 1359 | TGGAGAACTAAAAGTATG | 1559 | human |
| | AGGACACUA | | AGCGTTAGGACACTATTTT | | |
| | UU | | AATTATTT | | |
| IL6_731 | CUAAAAGUA | 1360 | GTTCTCTATGGAGAACTA | 1560 | human |
| | UGAGCGUUA | | AAAGTATGAGCGTTAGGA | | |
| | GG | | CACTATTTT | | |
| IL6_723 | AUGGAGAAC | 1361 | CTTATGTTGTTCTCTATGG | 1561 | human |
| | UAAAAGUA | | AGAACTAAAAGTATGAGC | | |
| | UGA | | GTTAGGAC | | |
| IL6_717 | UUCUCUAUG | 1362 | ACAGAACTTATGTTGTTCT | 1562 | human |
| | GAGAACUAA | | CTATGGAGAACTAAAAGT | | |
| | AA | | ATGAGCGT | | |
| IL6_697 | UGGGCACAG | 1363 | CAGAAACCTGTCCACTGG | 1563 | human |
| | AACUUAUGU | | GCACAGAACTTATGTTGTT | | |
| | UG | | CTCTATGG | | |
| IL6_691 | GUCCACUGG | 1364 | TCTGGTCAGAAACCTGTC | 1564 | human |
| | GCACAGAAC | | CACTGGGCACAGAACTTA | | |
| | UU | | TGTTGTTCT | | |
| IL6_654 | GUUGUUAA | 1365 | GCACCTCAGATTGTTGTTG | 1565 | human |
| | UGGGCAUUC | | TTAATGGGCATTCCTTCTT | | |
| | CUU | | CTGGTCA | | |
| IL6_629 | UGUAGCAUG | 1366 | GGGCTCTTCGGCAAATGT | 1566 | human |
| | GGCACCUCA | | AGCATGGGCACCTCAGAT | | |
| | GA | | TGTTGTTGT | | |
| IL6_580 | CGCAGCUUU | 1367 | ACTCATCTCATTCTGCGCA | 1567 | human |
| | AAGGAGUUC | | GCTTTAAGGAGTTCCTGC | | |
| | CU | | AGTCCAGC | | |
| IL6_58 | CCAGCUAUG | 1368 | CTCCCCTCCAGGAGCCCA | 1568 | human |
| | AACUCCUUC | | GCTATGAACTCCTTCTCCA | | |
| | UC | | CAATACCC | | |
| IL6_561 | GACAACUCA | 1369 | GTGGCTGCAGGACATGAC | 1569 | human |
| | UCUCAUUCU | | AACTCATCTCATTCTGCGC | | |
| | GC | | AGCTTTAA | | |
| IL6_54 | GAGCCCAGC | 1370 | CTATCTCCCCTCCAGGAGC | 1570 | human |
| | UAUGAACUC | | CCAGCTATGAACTCCTTCT | | |
| | CU | | CCACAAT | | |
| IL6_427 | AUGAGUACA | 1371 | GCCAGAGCTGTGCAGATG | 1571 | human |
| | AAAGUCCUG | | AGTACAAAAGTCCTGATC | | |
| | AU | | CAGTTCCTG | | |
| IL6_423 | GCAGAUGAG | 1372 | ACAAGCCAGAGCTGTGCA | 1572 | human |
| | UACAAAAGU | | GATGAGTACAAAAGTCCT | | |
| | CC | | GATCCAGTT | | |
| IL6_404 | AGGAACAAG | 1373 | GATTTGAGAGTAGTGAGG | 1573 | human |
| | CCAGAGCUG | | AACAAGCCAGAGCTGTGC | | |
| | UG | | AGATGAGTA | | |
| IL6_382 | CAGAACAGA | 1374 | TACCTAGAGTACCTCCAG | 1574 | human |
| | UUUGAGAG | | AACAGATTTGAGAGTAGT | | |
| | UAG | | GAGGAACAA | | |
| IL6_381 | CCAGAACAG | 1375 | ATACCTAGAGTACCTCCA | 1575 | human |
| | AUUUGAGA | | GAACAGATTTGAGAGTAG | | |
| | GUA | | TGAGGAACA | | |
| IL6_352 | UUGGAGUU | 1376 | ATCATCACTGGTCTTTTGG | 1576 | human |
| | UGAGGUAU | | AGTTTGAGGTATACCTAG | | |
| | ACCU | | AGTACCTC | | |
| IL6_343 | ACUGGUCUU | 1377 | CTGGTGAAAATCATCACT | 1577 | human |
| | UUGGAGUU | | GGTCTTTTGGAGTTTGAGG | | |
| | UGA | | TATACCTA | | |
| IL6_339 | CAUCACUGG | 1378 | TTGCCTGGTGAAAATCAT | 1578 | human |
| | UCUUUUGGA | | CACTGGTCTTTTGGAGTTT | | |
| | GU | | GAGGTATA | | |
| IL6_331 | GUGAAAAUC | 1379 | GAGGAGACTTGCCTGGTG | 1579 | human |
| | AUCACUGGU | | AAAATCATCACTGGTCTTT | | |
| | CU | | TGGAGTTT | | |
| IL6_325 | UGCCUGGUG | 1380 | TTCAATGAGGAGACTTGC | 1580 | human |
| | AAAAUCAUC | | CTGGTGAAAATCATCACT | | |
| | AC | | GGTCTTTTG | | |
| IL6_324 | UUGCCUGGU | 1381 | ATTCAATGAGGAGACTTG | 1581 | human |
| | GAAAAUCAU | | CCTGGTGAAAATCATCAC | | |
| | CA | | TGGTCTTTT | | |
| IL6_311 | UCAAUGAGG | 1382 | GCTTCCAATCTGGATTCAA | 1582 | human |
| | AGACUUGCC | | TGAGGAGACTTGCCTGGT | | |
| | UG | | GAAAATCA | | |
| IL6_309 | AUUCAAUGA | 1383 | ATGCTTCCAATCTGGATTC | 1583 | human |
| | GGAGACUUG | | AATGAGGAGACTTGCCTG | | |
| | CC | | GTGAAAAT | | |
| IL6_296 | GCUUCCAAU | 1384 | CTGAAAAAGATGGATGCT | 1584 | human |
| | CUGGAUUCA | | TCCAATCTGGATTCAATG | | |
| | AU | | AGGAGACTT | | |
| IL6_248 | UGGCAGAAA | 1385 | GCAGCAAAGAGGCACTGG | 1585 | human |
| | ACAACCUGA | | CAGAAAACAACCTGAACC | | |
| | AC | | TTCCAAAGA | | |
| IL6_217 | AGUAACAUG | 1386 | GAGACATGTAACAAGAGT | 1586 | human |
| | UGUGAAAGC | | AACATGTGTGAAAGCAGC | | |
| | AG | | AAAGAGGCA | | |
| IL6_210 | UAACAAGAG | 1387 | GAGAAAGGAGACATGTAA | 1587 | human |
| | UAACAUGUG | | CAAGAGTAACATGTGTGA | | |
| | UG | | AAGCAGCAA | | |
| IL6_209 | GUAACAAGA | 1388 | TGAGAAAGGAGACATGTA | 1588 | human |
| | GUAACAUGU | | ACAAGAGTAACATGTGTG | | |
| | GU | | AAAGCAGCA | | |
| IL6_203 | AGACAUGUA | 1389 | CAGCCCTGAGAAAGGAGA | 1589 | human |
| | ACAAGAGUA | | CATGTAACAAGAGTAACA | | |
| | AC | | TGTGTGAAA | | |
| IL6_201 | GGAGACAUG | 1390 | CTCAGCCCTGAGAAAGGA | 1590 | human |
| | UAACAAGAG | | GACATGTAACAAGAGTAA | | |
| | UA | | CATGTGTGA | | |
| IL6_1008 | UAUAAUGU | 1391 | TTTATATTGTATTTATATA | 1591 | human |
| | AUAAAUGG | | ATGTATAAATGGTTTTTAT | | |
| | UUUU | | ACCAATA | | |
| IL6_1007 | AUAUAAUG | 1392 | ATTTATATTGTATTTATAT | 1592 | human |
| | UAUAAAUG | | AATGTATAAATGGTTTTTA | | |
| | GUUU | | TACCAAT | | |
| IL6_1006 | UAUAUAAU | 1393 | TATTTATATTGTATTTATA | 1593 | human |
| | GUAUAAAU | | TAATGTATAAATGGTTTTT | | |
| | GGUU | | ATACCAA | | |
| IL6_1000 | UGUAUUUA | 1394 | AAGAAATATTTATATTGT | 1594 | human |
| | UAUAAUGU | | ATTTATATAATGTATAAAT | | |
| | AUAA | | GGTTTTTA | | |
| IL6_937 | UGUUAUAU | 1395 | AAGTGTCACTTGAAATGT | 1595 | mouse |
| | GUUAUAGU | | TATATGTTATAGTTTTGAA | | |
| | UUUG | | ATGATAAC | | |
| IL6_402 | UUGCCUAUU | 1396 | ATATAATCAGGAAATTTG | 1596 | mouse |
| | GAAAAUUUC | | CCTATTGAAAATTTCCTCT | | |
| | CU | | GGTCTTCT | | |
| IL6_1044 | UUGCUAAUU | 1397 | GTTTACCTCAATGAATTGC | 1597 | mouse |
| | UAAAUAUG | | TAATTTAAATATGTTTTTA | | |
| | UUU | | AAGAAAT | | |
| IL6_891 | UAAUUUAU | 1398 | AAGTAAACTTTAAGTTAA | 1598 | mouse |
| | GAUUGAUA | | TTTATGATTGATATTTATT | | |
| | UUUA | | ATTTTTAT | | |
| IL6_855 | UAAUUUAU | 1399 | TATTTTAATTATTTTTAAT | 1599 | mouse |
| | UGAUAAUU | | TTATTGATAATTTAAATAA | | |
| | UAAA | | GTAAACT | | |
| IL6_1036 | UCAAUGAAU | 1400 | ATGTATAAGTTTACCTCAA | 1600 | mouse |
| | UGCUAAUUU | | TGAATTGCTAATTTAAATA | | |
| | AA | | TGTTTTT | | |
| IL6_886 | UAAGUUAA | 1401 | TAAATAAGTAAACTTTAA | 1601 | mouse |
| | UUUAUGAU | | GTTAATTTATGATTGATAT | | |
| | UGAU | | TTATTATT | | |
| IL6_884 | UUUAAGUU | 1402 | TTTAAATAAGTAAACTTTA | 1602 | mouse |
| | AAUUUAUG | | AGTTAATTTATGATTGATA | | |
| | AUUG | | TTTATTA | | |
| IL6_827 | AAUGUUGG | 1403 | AGAACTGACAATATGAAT | 1603 | mouse |
| | GACACUAUU | | GTTGGGACACTATTTTAAT | | |
| | UUA | | TATTTTTA | | |
| IL6_1029 | GUUUACCUC | 1404 | TCTTGGAATGTATAAGTTT | 1604 | mouse |
| | AAUGAAUU | | ACCTCAATGAATTGCTAA | | |
| | GCU | | TTTAAATA | | |
| IL6_1016 | UUGGAAUG | 1405 | TAGCCAGATGGTTTCTTGG | 1605 | mouse |
| | UAUAAGUU | | AATGTATAAGTTTACCTCA | | |
| | UACC | | ATGAATT | | |
| IL6_779 | UGUCAGGUA | 1406 | GAAAATATATCCTGTTGTC | 1606 | mouse |
| | UCUGACUUA | | AGGTATCTGACTTATGTTG | | |
| | UG | | TTCTCTA | | |
| IL6_1066 | AAAGAAAUC | 1407 | TTTAAATATGTTTTTAAAG | 1607 | mouse |
| | UUUGUGAU | | AAATCTTTGTGATGTATTT | | |
| | GUA | | TTATAAT | | |
| IL6_854 | UUAAUUUA | 1408 | CTATTTTAATTATTTTTAA | 1608 | mouse |
| | UUGAUAAU | | TTTATTGATAATTTAAATA | | |
| | UUAA | | AGTAAAC | | |
| IL6_830 | GUUGGGACA | 1409 | ACTGACAATATGAATGTT | 1609 | mouse |
| | CUAUUUUAA | | GGGACACTATTTTAATTAT | | |
| | UU | | TTTTAATT | | |
| IL6_1089 | UUAUAAUG | 1410 | CTTTGTGATGTATTTTTAT | 1610 | mouse |
| | UUUAGACUG | | AATGTTTAGACTGTCTTCA | | |
| | UCU | | AACAAAT | | |
| IL6_931 | UUGAAAUG | 1411 | TTTATGAAGTGTCACTTGA | 1611 | mouse |
| | UUAUAUGU | | AATGTTATATGTTATAGTT | | |
| | UAUA | | TTGAAAT | | |
| IL6_538 | AACCAAGAG | 1412 | CTAATTCATATCTTCAACC | 1612 | mouse |
| | GUAAAAGA | | AAGAGGTAAAAGATTTAC | | |
| | UUU | | ATAAAATA | | |
| IL6_887 | AAGUUAAU | 1413 | AAATAAGTAAACTTTAAG | 1613 | mouse |
| | UUAUGAUU | | TTAATTTATGATTGATATT | | |
| | GAUA | | TATTATTT | | |
| IL6_408 | AUUGAAAA | 1414 | TCAGGAAATTTGCCTATTG | 1614 | mouse |
| | UUUCCUCUG | | AAAATTTCCTCTGGTCTTC | | |
| | GUC | | TGGAGTA | | |
| IL6_235 | GGCUUAAUU | 1415 | ACTTCACAAGTCGGAGGC | 1615 | mouse |
| | ACACAUGUU | | TTAATTACACATGTTCTCT | | |
| | CU | | GGGAAATC | | |
| IL6_725 | CUAAGCAUA | 1416 | CCTAGTGCGTTATGCCTAA | 1616 | mouse |
| | UCAGUUUGU | | GCATATCAGTTTGTGGAC | | |
| | GG | | ATTCCTCA | | |
| IL6_401 | UUUGCCUAU | 1417 | GATATAATCAGGAAATTT | 1617 | mouse |
| | UGAAAAUU | | GCCTATTGAAAATTTCCTC | | |
| | UCC | | TGGTCTTC | | |
| IL6_973 | AUCUAUUUG | 1418 | AATGATAACCTAAAAATC | 1618 | mouse |
| | AUAUAAAU | | TATTTGATATAAATATTCT | | |
| | AUU | | GTTACCTA | | |
| IL6_926 | GUCACUUGA | 1419 | TTATTTTTATGAAGTGTCA | 1619 | mouse |
| | AAUGUUAU | | CTTGAAATGTTATATGTTA | | |
| | AUG | | TAGTTTT | | |
| IL6_862 | UUGAUAAU | 1420 | ATTATTTTTAATTTATTGA | 1620 | mouse |
| | UUAAAUAA | | TAATTTAAATAAGTAAAC | | |
| | GUAA | | TTTAAGTT | | |
| IL6_868 | AUUUAAAU | 1421 | TTTAATTTATTGATAATTT | 1621 | mouse |
| | AAGUAAACU | | AAATAAGTAAACTTTAAG | | |
| | UUA | | TTAATTTA | | |
| IL6_869 | UUUAAAUA | 1422 | TTAATTTATTGATAATTTA | 1622 | mouse |
| | AGUAAACUU | | AATAAGTAAACTTTAAGT | | |
| | UAA | | TAATTTAT | | |
| IL6_885 | UUAAGUUA | 1423 | TTAAATAAGTAAACTTTA | 1623 | mouse |
| | AUUUAUGA | | AGTTAATTTATGATTGATA | | |
| | UUGA | | TTTATTAT | | |
| IL6_871 | UAAAUAAG | 1424 | AATTTATTGATAATTTAAA | 1624 | mouse |
| | UAAACUUUA | | TAAGTAAACTTTAAGTTA | | |
| | AGU | | ATTTATGA | | |
| IL6_652 | UUCAUCUUG | 1425 | ACCAAGACCATCCAATTC | 1625 | mouse |
| | AAAUCACUU | | ATCTTGAAATCACTTGAA | | |
| | GA | | GAATTTCTA | | |
| IL6_816 | CUGACAAUA | 1426 | GTTCTCTACGAAGAACTG | 1626 | mouse |
| | UGAAUGUU | | ACAATATGAATGTTGGGA | | |
| | GGG | | CACTATTTT | | |
| IL6_802 | UUCUCUACG | 1427 | ATCTGACTTATGTTGTTCT | 1627 | mouse |
| | AAGAACUGA | | CTACGAAGAACTGACAAT | | |
| | CA | | ATGAATGT | | |
| IL6_761 | UCAGAAAAU | 1428 | CATTCCTCACTGTGGTCAG | 1628 | mouse |
| | AUAUCCUGU | | AAAATATATCCTGTTGTCA | | |
| | UG | | GGTATCT | | |
| IL6_1007 | GAUGGUUUC | 1429 | TCTGTTACCTAGCCAGATG | 1629 | mouse |
| | UUGGAAUG | | GTTTCTTGGAATGTATAAG | | |
| | UAU | | TTTACCT | | |
| IL6_923 | AGUGUCACU | 1430 | TTATTATTTTTATGAAGTG | 1630 | mouse |
| | UGAAAUGU | | TCACTTGAAATGTTATATG | | |
| | UAU | | TTATAGT | | |
| IL6_978 | UUUGAUAU | 1431 | TAACCTAAAAATCTATTTG | 1631 | mouse |
| | AAAUAUUCU | | ATATAAATATTCTGTTACC | | |
| | GUU | | TAGCCAG | | |
| IL6_1063 | UUUAAAGA | 1432 | TAATTTAAATATGTTTTTA | 1632 | mouse |
| | AAUCUUUGU | | AAGAAATCTTTGTGATGT | | |
| | GAU | | ATTTTTAT | | |
| IL6_953 | UUUGAAAU | 1433 | GTTATATGTTATAGTTTTG | 1633 | mouse |
| | GAUAACCUA | | AAATGATAACCTAAAAAT | | |
| | AAA | | CTATTTGA | | |
| IL6_389 | AUAAUCAGG | 1434 | GCTACCAAACTGGATATA | 1634 | mouse |
| | AAAUUUGCC | | ATCAGGAAATTTGCCTATT | | |
| | UA | | GAAAATTT | | |
| IL6_541 | CAAGAGGUA | 1435 | ATTCATATCTTCAACCAAG | 1635 | mouse |
| | AAAGAUUU | | AGGTAAAAGATTTACATA | | |
| | ACA | | AAATAGTC | | |
| IL6_268 | GAAAUGAG | 1436 | CTCTGGGAAATCGTGGAA | 1636 | mouse |
| | AAAAGAGU | | ATGAGAAAAGAGTTGTGC | | |
| | UGUG | | AATGGCAAT | | |
| IL6_880 | AAACUUUAA | 1437 | ATAATTTAAATAAGTAAA | 1637 | mouse |
| | GUUAAUUU | | CTTTAAGTTAATTTATGAT | | |
| | AUG | | TGATATTT | | |
| IL6_861 | AUUGAUAA | 1438 | AATTATTTTTAATTTATTG | 1638 | mouse |
| | UUUAAAUA | | ATAATTTAAATAAGTAAA | | |
| | AGUA | | CTTTAAGT | | |
| IL6_875 | UAAGUAAAC | 1439 | TATTGATAATTTAAATAA | 1639 | mouse |
| | UUUAAGUU | | GTAAACTTTAAGTTAATTT | | |
| | AAU | | ATGATTGA | | |
| IL6_256 | UGGGAAAUC | 1440 | ATTACACATGTTCTCTGGG | 1640 | mouse |
| | GUGGAAAU | | AAATCGTGGAAATGAGAA | | |
| | GAG | | AAGAGTTG | | |
| IL6_351 | AGAGAUACA | 1441 | CAATCTGAAACTTCCAGA | 1641 | mouse |
| | AAGAAAUG | | GATACAAAGAAATGATGG | | |
| | AUG | | ATGCTACCA | | |
| IL6_824 | AUGAAUGU | 1442 | CGAAGAACTGACAATATG | 1642 | mouse |
| | UGGGACACU | | AATGTTGGGACACTATTTT | | |
| | AUU | | AATTATTT | | |
| IL6_332 | AAAACAAUC | 1443 | ATGATGCACTTGCAGAAA | 1643 | mouse |
| | UGAAACUUC | | ACAATCTGAAACTTCCAG | | |
| | CA | | AGATACAAA | | |
| IL6_403 | UGCCUAUUG | 1444 | TATAATCAGGAAATTTGC | 1644 | mouse |
| | AAAAUUUCC | | CTATTGAAAATTTCCTCTG | | |
| | UC | | GTCTTCTG | | |
| IL6_762 | CAGAAAAUA | 1445 | ATTCCTCACTGTGGTCAGA | 1645 | mouse |
| | UAUCCUGUU | | AAATATATCCTGTTGTCAG | | |
| | GU | | GTATCTG | | |
| IL6_879 | UAAACUUUA | 1446 | GATAATTTAAATAAGTAA | 1646 | mouse |
| | AGUUAAUU | | ACTTTAAGTTAATTTATGA | | |
| | UAU | | TTGATATT | | |
| IL6_947 | UAUAGUUU | 1447 | TGAAATGTTATATGTTATA | 1647 | mouse |
| | UGAAAUGA | | GTTTTGAAATGATAACCT | | |
| | UAAC | | AAAAATCT | | |
| IL6_649 | CAAUUCAUC | 1448 | AGGACCAAGACCATCCAA | 1648 | mouse |
| | UUGAAAUCA | | TTCATCTTGAAATCACTTG | | |
| | CU | | AAGAATTT | | |
| IL6_897 | AUGAUUGA | 1449 | ACTTTAAGTTAATTTATGA | 1649 | mouse |
| | UAUUUAUU | | TTGATATTTATTATTTTTA | | |
| | AUUU | | TGAAGTG | | |
| IL6_1043 | AUUGCUAAU | 1450 | AGTTTACCTCAATGAATTG | 1650 | mouse |
| | UUAAAUAU | | CTAATTTAAATATGTTTTT | | |
| | GUU | | AAAGAAA | | |
| IL6_576 | UACCCCAAU | 1451 | TAAAATAGTCCTTCCTACC | 1651 | mouse |
| | UUCCAAUGC | | CCAATTTCCAATGCTCTCC | | |
| | UC | | TAACAGA | | |
| IL6_90 | CUCUGCAAG | 1452 | CGCTATGAAGTTCCTCTCT | 1652 | mouse |
| | AGACUUCCA | | GCAAGAGACTTCCATCCA | | |
| | UC | | GTTGCCTT | | |
| IL6_378 | CCAAACUGG | 1453 | AAATGATGGATGCTACCA | 1653 | mouse |
| | AUAUAAUCA | | AACTGGATATAATCAGGA | | |
| | GG | | AATTTGCCT | | |
| IL6_853 | UUUAAUUU | 1454 | ACTATTTTAATTATTTTTA | 1654 | mouse |
| | AUUGAUAA | | ATTTATTGATAATTTAAAT | | |
| | UUUA | | AAGTAAA | | |
| IL6_367 | GAUGGAUGC | 1455 | GAGATACAAAGAAATGAT | 1655 | mouse |
| | UACCAAACU | | GGATGCTACCAAACTGGA | | |
| | GG | | TATAATCAG | | |
| IL6_992 | UCUGUUACC | 1456 | ATTTGATATAAATATTCTG | 1656 | mouse |
| | UAGCCAGAU | | TTACCTAGCCAGATGGTTT | | |
| | GG | | CTTGGAA | | |
| IL6_939 | UUAUAUGU | 1457 | GTGTCACTTGAAATGTTAT | 1657 | mouse |
| | UAUAGUUU | | ATGTTATAGTTTTGAAATG | | |
| | UGAA | | ATAACCT | | |
| IL6_1037 | CAAUGAAUU | 1458 | TGTATAAGTTTACCTCAAT | 1658 | mouse |
| | GCUAAUUUA | | GAATTGCTAATTTAAATAT | | |
| | AA | | GTTTTTA | | |
| IL6_661 | AAAUCACUU | 1459 | ATCCAATTCATCTTGAAAT | 1659 | mouse |
| | GAAGAAUU | | CACTTGAAGAATTTCTAA | | |
| | UCU | | AAGTCACT | | |
| IL6_1042 | AAUUGCUAA | 1460 | AAGTTTACCTCAATGAATT | 1660 | mouse |
| | UUUAAAUA | | GCTAATTTAAATATGTTTT | | |
| | UGU | | TAAAGAA | | |
| IL6_995 | GUUACCUAG | 1461 | TGATATAAATATTCTGTTA | 1661 | mouse |
| | CCAGAUGGU | | CCTAGCCAGATGGTTTCTT | | |
| | UU | | GGAATGT | | |
| IL6_1017 | UGGAAUGU | 1462 | AGCCAGATGGTTTCTTGG | 1662 | mouse |
| | AUAAGUUU | | AATGTATAAGTTTACCTCA | | |
| | ACCU | | ATGAATTG | | |
| IL6_929 | ACUUGAAAU | 1463 | TTTTTATGAAGTGTCACTT | 1663 | mouse |
| | GUUAUAUG | | GAAATGTTATATGTTATA | | |
| | UUA | | GTTTTGAA | | |
| IL6_878 | GUAAACUUU | 1464 | TGATAATTTAAATAAGTA | 1664 | mouse |
| | AAGUUAAU | | AACTTTAAGTTAATTTATG | | |
| | UUA | | ATTGATAT | | |
| IL6_945 | GUUAUAGU | 1465 | CTTGAAATGTTATATGTTA | 1665 | mouse |
| | UUUGAAAU | | TAGTTTTGAAATGATAAC | | |
| | GAUA | | CTAAAAAT | | |
| IL6_285 | GUGCAAUGG | 1466 | AATGAGAAAAGAGTTGTG | 1666 | mouse |
| | CAAUUCUGA | | CAATGGCAATTCTGATTGT | | |
| | UU | | ATGAACAA | | |
| IL6_662 | AAUCACUUG | 1467 | TCCAATTCATCTTGAAATC | 1667 | mouse |
| | AAGAAUUUC | | ACTTGAAGAATTTCTAAA | | |
| | UA | | AGTCACTT | | |
| IL6_852 | UUUUAAUU | 1468 | CACTATTTTAATTATTTTT | 1668 | mouse |
| | UAUUGAUA | | AATTTATTGATAATTTAAA | | |
| | AUUU | | TAAGTAA | | |
| IL6_348 | UCCAGAGAU | 1469 | AAACAATCTGAAACTTCC | 1669 | mouse |
| | ACAAAGAAA | | AGAGATACAAAGAAATGA | | |
| | UG | | TGGATGCTA | | |
| IL6_883 | CUUUAAGUU | 1470 | ATTTAAATAAGTAAACTTT | 1670 | mouse |
| | AAUUUAUG | | AAGTTAATTTATGATTGAT | | |
| | AUU | | ATTTATT | | |
| IL6_1033 | ACCUCAAUG | 1471 | GGAATGTATAAGTTTACC | 1671 | mouse |
| | AAUUGCUAA | | TCAATGAATTGCTAATTTA | | |
| | UU | | AATATGTT | | |
| IL6_758 | UGGUCAGAA | 1472 | GGACATTCCTCACTGTGGT | 1672 | mouse |
| | AAUAUAUCC | | CAGAAAATATATCCTGTT | | |
| | UG | | GTCAGGTA | | |
| IL6_1090 | UAUAAUGU | 1473 | TTTGTGATGTATTTTTATA | 1673 | mouse |
| | UUAGACUGU | | ATGTTTAGACTGTCTTCAA | | |
| | CUU | | ACAAATA | | |
| IL6_979 | UUGAUAUA | 1474 | AACCTAAAAATCTATTTG | 1674 | mouse |
| | AAUAUUCUG | | ATATAAATATTCTGTTACC | | |
| | UUA | | TAGCCAGA | | |
| IL6_916 | UUUAUGAA | 1475 | TTGATATTTATTATTTTTA | 1675 | mouse |
| | GUGUCACUU | | TGAAGTGTCACTTGAAAT | | |
| | GAA | | GTTATATG | | |
| IL6_328 | GCAGAAAAC | 1476 | AACGATGATGCACTTGCA | 1676 | mouse |
| | AAUCUGAAA | | GAAAACAATCTGAAACTT | | |
| | CU | | CCAGAGATA | | |
| IL6_831 | UUGGGACAC | 1477 | CTGACAATATGAATGTTG | 1677 | mouse |
| | UAUUUUAA | | GGACACTATTTTAATTATT | | |
| | UUA | | TTTAATTT | | |
| IL6_385 | GGAUAUAA | 1478 | GGATGCTACCAAACTGGA | 1678 | mouse |
| | UCAGGAAAU | | TATAATCAGGAAATTTGC | | |
| | UUG | | CTATTGAAA | | |
| IL6_1087 | UUUUAUAA | 1479 | ATCTTTGTGATGTATTTTT | 1679 | mouse |
| | UGUUUAGAC | | ATAATGTTTAGACTGTCTT | | |
| | UGU | | CAAACAA | | |
| IL6_249 | UGUUCUCUG | 1480 | AGGCTTAATTACACATGTT | 1680 | mouse |
| | GGAAAUCGU | | CTCTGGGAAATCGTGGAA | | |
| | GG | | ATGAGAAA | | |
| IL6_670 | GAAGAAUU | 1481 | ATCTTGAAATCACTTGAA | 1681 | mouse |
| | UCUAAAAGU | | GAATTTCTAAAAGTCACTT | | |
| | CAC | | TGAGATCT | | |
| IL6_653 | UCAUCUUGA | 1482 | CCAAGACCATCCAATTCA | 1682 | mouse |
| | AAUCACUUG | | TCTTGAAATCACTTGAAG | | |
| | AA | | AATTTCTAA | | |
| IL6_283 | UUGUGCAAU | 1483 | GAAATGAGAAAAGAGTTG | 1683 | mouse |
| | GGCAAUUCU | | TGCAATGGCAATTCTGATT | | |
| | GA | | GTATGAAC | | |
| IL6_532 | AUCUUCAAC | 1484 | GAAACTCTAATTCATATCT | 1684 | mouse |
| | CAAGAGGUA | | TCAACCAAGAGGTAAAAG | | |
| | AA | | ATTTACAT | | |
| IL6_996 | UUACCUAGC | 1485 | GATATAAATATTCTGTTAC | 1685 | mouse |
| | CAGAUGGUU | | CTAGCCAGATGGTTTCTTG | | |
| | UC | | GAATGTA | | |
| IL6_1032 | UACCUCAAU | 1486 | TGGAATGTATAAGTTTAC | 1686 | mouse |
| | GAAUUGCUA | | CTCAATGAATTGCTAATTT | | |
| | AU | | AAATATGT | | |
| IL6_657 | CUUGAAAUC | 1487 | GACCATCCAATTCATCTTG | 1687 | mouse |
| | ACUUGAAGA | | AAATCACTTGAAGAATTT | | |
| | AU | | CTAAAAGT | | |
| IL6_895 | UUAUGAUU | 1488 | AAACTTTAAGTTAATTTAT | 1688 | mouse |
| | GAUAUUUA | | GATTGATATTTATTATTTT | | |
| | UUAU | | TATGAAG | | |
| IL6_400 | AUUUGCCUA | 1489 | GGATATAATCAGGAAATT | 1689 | mouse |
| | UUGAAAAU | | TGCCTATTGAAAATTTCCT | | |
| | UUC | | CTGGTCTT | | |
| IL6_1014 | UCUUGGAAU | 1490 | CCTAGCCAGATGGTTTCTT | 1690 | mouse |
| | GUAUAAGU | | GGAATGTATAAGTTTACC | | |
| | UUA | | TCAATGAA | | |
| IL6_866 | UAAUUUAA | 1491 | TTTTTAATTTATTGATAAT | 1691 | mouse |
| | AUAAGUAA | | TTAAATAAGTAAACTTTA | | |
| | ACUU | | AGTTAATT | | |
| IL6_339 | UCUGAAACU | 1492 | ACTTGCAGAAAACAATCT | 1692 | mouse |
| | UCCAGAGAU | | GAAACTTCCAGAGATACA | | |
| | AC | | AAGAAATGA | | |
| IL6_233 | GAGGCUUAA | 1493 | CCACTTCACAAGTCGGAG | 1693 | mouse |
| | UUACACAUG | | GCTTAATTACACATGTTCT | | |
| | UU | | CTGGGAAA | | |
| IL6_877 | AGUAAACUU | 1494 | TTGATAATTTAAATAAGT | 1694 | mouse |
| | UAAGUUAA | | AAACTTTAAGTTAATTTAT | | |
| | UUU | | GATTGATA | | |

TABLE 11C
Host target FURIN - 20 nucleotide targets and 45 nucleotide gene
target regions

| | | SEQ | | SEQ | |
|---|---|---|---|---|---|
| SEQUENCE | | ID | | ID | |
| ID | 20 nt Sequence | NO: | 45 nt Gene Region | NO: | Species |
| FURIN_4183 | AUGGACAUGAG | 1695 | TGCTGGTTCTATTTAATGGACAT | 1795 | human |
| | AUAAUGUUA | | GAGATAATGTTAGAGGTTTTAA | | |
| FURIN_3561 | UUUAGAUGCUG | 1696 | TTGTGATTATTTCACTTTAGATG | 1796 | human |
| | AUGAUUUGU | | CTGATGATTTGTTTTTGTATTT | | |
| FURIN_3555 | UUUCACUUUAG | 1697 | TTCACTTTGTGATTATTTCACTTT | 1797 | human |
| | AUGCUGAUG | | AGATGCTGATGATTTGTTTTT | | |
| FURIN_3563 | UAGAUGCUGAU | 1698 | GTGATTATTTCACTTTAGATGCT | 1798 | human |
| | GAUUUGUUU | | GATGATTTGTTTTTGTATTTTT | | |
| FURIN_3529 | GAGGAUAUAUU | 1699 | TCTCAGGGGCTGTTTGAGGATAT | 1799 | human |
| | UUCACUUUG | | ATTTTCACTTTGTGATTATTTC | | |
| FURIN_4161 | CCAGCAUUGCU | 1700 | GTAATTTAAACAGGCCCAGCATT | 1800 | human |
| | GGUUCUAUU | | GCTGGTTCTATTTAATGGACAT | | |
| FURIN_3537 | AUUUUCACUUU | 1701 | GCTGTTTGAGGATATATTTTCAC | 1801 | human |
| | GUGAUUAUU | | TTTGTGATTATTTCACTTTAGA | | |
| FURIN_1873 | GCCUUCAUGAC | 1702 | GGGTTTAATGACTGGGCCTTCAT | 1802 | human |
| | AACUCAUUC | | GACAACTCATTCCTGGGATGAG | | |
| FURIN_3545 | UUUGUGAUUAU | 1703 | AGGATATATTTTCACTTTGTGAT | 1803 | human |
| | UUCACUUUA | | TATTTCACTTTAGATGCTGATG | | |
| FURIN_3525 | GUUUGAGGAUA | 1704 | GGGATCTCAGGGGCTGTTTGAGG | 1804 | human |
| | UAUUUUCAC | | ATATATTTTCACTTTGTGATTA | | |
| FURIN_4184 | UGGACAUGAGA | 1705 | GCTGGTTCTATTTAATGGACATG | 1805 | human |
| | UAAUGUUAG | | AGATAATGTTAGAGGTTTTAAA | | |
| FURIN_3995 | UCUGGGAGUCC | 1706 | ATCAGTCCCCTCCCATCTGGGAG | 1806 | human |
| | CCUUUUCUU | | TCCCCTTTTCTTTTCTACCCTA | | |
| FURIN_4152 | UAAACAGGCCC | 1707 | TTTTTTCTTGTAATTTAAACAGG | 1807 | human |
| | AGCAUUGCU | | CCCAGCATTGCTGGTTCTATTT | | |
| FURIN_1878 | CAUGACAACUC | 1708 | TAATGACTGGGCCTTCATGACAA | 1808 | human |
| | AUUCCUGGG | | CTCATTCCTGGGATGAGGATCC | | |
| FURIN_4192 | AGAUAAUGUUA | 1709 | TATTTAATGGACATGAGATAATG | 1809 | human |
| | GAGGUUUUA | | TTAGAGGTTTTAAAGTGATTAA | | |
| FURIN_1969 | ACCAAGUUCAC | 1710 | AACTATGGGACGCTGACCAAGTT | 1810 | human |
| | CCUCGUACU | | CACCCTCGTACTCTATGGCACC | | |
| FURIN_312 | AGCAGCAACAG | 1711 | GTTGCTATGGGTGGTAGCAGCAA | 1811 | human |
| | GAACCUUGG | | CAGGAACCTTGGTCCTGCTAGC | | |
| FURIN_3538 | UUUUCACUUUG | 1712 | CTGTTTGAGGATATATTTTCACT | 1812 | human |
| | UGAUUAUUU | | TTGTGATTATTTCACTTTAGAT | | |
| FURIN_4193 | GAUAAUGUUAG | 1713 | ATTTAATGGACATGAGATAATGT | 1813 | human |
| | AGGUUUUAA | | TAGAGGTTTTAAAGTGATTAAA | | |
| FURIN_3957 | UUUGCACCCCU | 1714 | TCTTCTGACGTGCCTTTTGCACC | 1814 | human |
| | CCCAUUAGG | | CCTCCCATTAGGACAATCAGTC | | |
| FURIN_1925 | UAGAGAUUGAA | 1715 | CTGGCGAGTGGGTCCTAGAGATT | 1815 | human |
| | AACACCAGC | | GAAAACACCAGCGAAGCCAACA | | |
| FURIN_2894 | AAAGGAGUGAA | 1716 | CCCTTCCATGTGGAGAAAGGAGT | 1816 | human |
| | ACCUUUAGG | | GAAACCTTTAGGGCAGCTTGCC | | |
| FURIN_4117 | CUGGGUUGGUG | 1717 | TGGTTTTGTAAGATGCTGGGTTG | 1817 | human |
| | CACAGUGAU | | GTGCACAGTGATTTTTTTCTTG | | |
| FURIN_3534 | UAUAUUUUCAC | 1718 | GGGGCTGTTTGAGGATATATTTT | 1818 | human |
| | UUUGUGAUU | | CACTTTGTGATTATTTCACTTT | | |
| FURIN_4150 | UUUAAACAGGC | 1719 | ATTTTTTTCTTGTAATTTAAACAG | 1819 | human |
| | CCAGCAUUG | | GCCCAGCATTGCTGGTTCTAT | | |
| FURIN_3929 | CCCUCAAACCU | 1720 | TGACCTGTCATGCCCCCCTCAAA | 1820 | human |
| | CCUCUUCUG | | CCTCCTCTTCTGACGTGCCTTT | | |
| FURIN_3560 | CUUUAGAUGCU | 1721 | TTTGTGATTATTTCACTTTAGATG | 1821 | human |
| | GAUGAUUUG | | CTGATGATTTGTTTTTGTATT | | |
| FURIN_4100 | GCUGGUUUUGU | 1722 | CTCGTGGCCAGCCCGGCTGGTTT | 1822 | human |
| | AAGAUGCUG | | TGTAAGATGCTGGGTTGGTGCA | | |
| FURIN_712 | CACGGCAUUGU | 1723 | CAGGGCTACACAGGGCACGGCA | 1823 | human |
| | GGUCUCCAU | | TTGTGGTCTCCATTCTGGACGAT | | |
| FURIN_3541 | UCACUUUGUGA | 1724 | TTTGAGGATATATTTTCACTTTGT | 1824 | human |
| | UUAUUUCAC | | GATTATTTCACTTTAGATGCT | | |
| FURIN_4169 | GCUGGUUCUAU | 1725 | AACAGGCCCAGCATTGCTGGTTC | 1825 | human |
| | UUAAUGGAC | | TATTTAATGGACATGAGATAAT | | |
| FURIN_1303 | AGCAGUGGCAA | 1726 | CTGGCCACGACCTACAGCAGTG | 1826 | human |
| | CCAGAAUGA | | GCAACCAGAATGAGAAGCAGATC | | |
| FURIN_765 | CUUGGCAGGCA | 1727 | GAAGAACCACCCGGACTTGGCA | 1827 | human |
| | AUUAUGAUC | | GGCAATTATGATCCTGGGGCCAG | | |
| FURIN_1942 | AGCGAAGCCAA | 1728 | GAGATTGAAAACACCAGCGAAG | 1828 | human |
| | CAACUAUGG | | CCAACAACTATGGGACGCTGACC | | |
| FURIN_1945 | GAAGCCAACAA | 1729 | ATTGAAAACACCAGCGAAGCCA | 1829 | human |
| | CUAUGGGAC | | ACAACTATGGGACGCTGACCAAG | | |
| FURIN_2780 | GGAGACUGCUU | 1730 | GGAGGCAAGAGGGGTGGAGACT | 1830 | human |
| | CCCAUCCUA | | GCTTCCCATCCTACCCTCGGGCC | | |
| FURIN_3827 | UCAUAGGUCAC | 1731 | CGCCATGCCGGGGGTTCATAGGT | 1831 | human |
| | UGGCUCUCC | | CACTGGCTCTCCAAGTGCCAGA | | |
| FURIN_3547 | UGUGAUUAUUU | 1732 | GATATATTTTCACTTTGTGATTAT | 1832 | human |
| | CACUUUAGA | | TTCACTTTAGATGCTGATGAT | | |
| FURIN_3559 | ACUUUAGAUGC | 1733 | CTTTGTGATTATTTCACTTTAGAT | 1833 | human |
| | UGAUGAUUU | | GCTGATGATTTGTTTTTGTAT | | |
| FURIN_4177 | UAUUUAAUGGA | 1734 | CAGCATTGCTGGTTCTATTTAAT | 1834 | human |
| | CAUGAGAUA | | GGACATGAGATAATGTTAGAGG | | |
| FURIN_2158 | UAUAGCACCGA | 1735 | GTCCTCGATACGCACTATAGCAC | 1835 | human |
| | GAAUGACGU | | CGAGAATGACGTGGAGACCATC | | |
| FURIN_4165 | CAUUGCUGGUU | 1736 | TTTAAACAGGCCCAGCATTGCTG | 1836 | human |
| | CUAUUUAAU | | GTTCTATTTAATGGACATGAGA | | |
| FURIN_4186 | GACAUGAGAUA | 1737 | TGGTTCTATTTAATGGACATGAG | 1837 | human |
| | AUGUUAGAG | | ATAATGTTAGAGGTTTTAAAGT | | |
| FURIN_779 | AUGAUCCUGGG | 1738 | ACTTGGCAGGCAATTATGATCCT | 1838 | human |
| | GCCAGUUUU | | GGGGCCAGTTTTGATGTCAATG | | |
| FURIN_1871 | GGGCCUUCAUG | 1739 | ATGGGTTTAATGACTGGGCCTTC | 1839 | human |
| | ACAACUCAU | | ATGACAACTCATTCCTGGGATG | | |
| FURIN_3552 | UUAUUUCACUU | 1740 | ATTTTCACTTTGTGATTATTTCAC | 1840 | human |
| | UAGAUGCUG | | TTTAGATGCTGATGATTTGTT | | |
| FURIN_4180 | UUAAUGGACAU | 1741 | CATTGCTGGTTCTATTTAATGGA | 1841 | human |
| | GAGAUAAUG | | CATGAGATAATGTTAGAGGTTT | | |
| FURIN_1429 | GCCAAUAAGAA | 1742 | GCTCTCACCCTGGAGGCCAATAA | 1842 | human |
| | CCUCACAUG | | GAACCTCACATGGCGGGACATG | | |
| FURIN_1654 | AAAGACAUCGG | 1743 | ATCCTCACCGAGCCCAAAGACAT | 1843 | human |
| | GAAACGGCU | | CGGGAAACGGCTCGAGGTGCGG | | |
| FURIN_3968 | CCCAUUAGGAC | 1744 | GCCTTTTGCACCCCTCCCATTAG | 1844 | human |
| | AAUCAGUCC | | GACAATCAGTCCCCTCCCATCT | | |
| FURIN_1855 | GAUGGGUUUAA | 1745 | CATGACTACTCCGCAGATGGGTT | 1845 | human |
| | UGACUGGGC | | TAATGACTGGGCCTTCATGACA | | |
| FURIN_3513 | AUCUCAGGGGC | 1746 | CTTTCCCCTGTGGGGATCTCAGG | 1846 | human |
| | UGUUUGAGG | | GGCTGTTTGAGGATATATTTTC | | |
| FURIN_4108 | UGUAAGAUGCU | 1747 | CAGCCCGGCTGGTTTTGTAAGAT | 1847 | human |
| | GGGUUGGUG | | GCTGGGTTGGTGCACAGTGATT | | |
| FURIN_4170 | CUGGUUCUAUU | 1748 | ACAGGCCCAGCATTGCTGGTTCT | 1848 | human |
| | UAAUGGACA | | ATTTAATGGACATGAGATAATG | | |
| FURIN_367 | UUCACCAACAC | 1749 | CAGGGCCAGAAGGTCTTCACCA | 1849 | human |
| | GUGGGCUGU | | ACACGTGGGCTGTGCGCATCCCT | | |
| FURIN_2492 | UGCGCUCUGGC | 1750 | TCCTGGTCCTGCAGCTGCGCTCT | 1850 | human |
| | UUUAGUUUU | | GGCTTTAGTTTTCGGGGGGTGA | | |
| FURIN_2882 | UUCCAUGUGGA | 1751 | CACCCTCAGCACCCCTTCCATGT | 1851 | human |
| | GAAAGGAGU | | GGAGAAAGGAGTGAAACCTTTA | | |
| FURIN_4175 | UCUAUUUAAUG | 1752 | CCCAGCATTGCTGGTTCTATTTA | 1852 | human |
| | GACAUGAGA | | ATGGACATGAGATAATGTTAGA | | |
| FURIN_4201 | UAGAGGUUUUA | 1753 | GACATGAGATAATGTTAGAGGTT | 1853 | human |
| | AAGUGAUUA | | TTAAAGTGATTAAACGTGCAGA | | |
| FURIN_749 | AGAAGAACCAC | 1754 | TGGACGATGGCATCGAGAAGAA | 1854 | human |
| | CCGGACUUG | | CCACCCGGACTTGGCAGGCAATT | | |
| FURIN_3523 | CUGUUUGAGGA | 1755 | TGGGGATCTCAGGGGCTGTTTGA | 1855 | human |
| | UAUAUUUUC | | GGATATATTTTCACTTTGTGAT | | |
| FURIN_1856 | AUGGGUUUAAU | 1756 | ATGACTACTCCGCAGATGGGTTT | 1856 | human |
| | GACUGGGCC | | AATGACTGGGCCTTCATGACAA | | |
| FURIN_1859 | GGUUUAAUGAC | 1757 | ACTACTCCGCAGATGGGTTTAAT | 1857 | human |
| | UGGGCCUUC | | GACTGGGCCTTCATGACAACTC | | |
| FURIN_2638 | UUUAUCAAAGA | 1758 | GGCGAGAGGACCGCCTTTATCA | 1858 | human |
| | CCAGAGCGC | | AAGACCAGAGCGCCCTCTGATGA | | |
| FURIN_3516 | UCAGGGGCUGU | 1759 | TCCCCTGTGGGGATCTCAGGGGC | 1859 | human |
| | UUGAGGAUA | | TGTTTGAGGATATATTTTCACT | | |
| FURIN_3554 | AUUUCACUUUA | 1760 | TTTCACTTTGTGATTATTTCACTT | 1860 | human |
| | GAUGCUGAU | | TAGATGCTGATGATTTGTTTT | | |
| FURIN_1936 | AACACCAGCGA | 1761 | GTCCTAGAGATTGAAAACACCA | 1861 | human |
| | AGCCAACAA | | GCGAAGCCAACAACTATGGGACG | | |
| FURIN_2458 | CUGGUCUUCGU | 1762 | TGCGCCTTCATCGTGCTGGTCTT | 1862 | human |
| | CACUGUCUU | | CGTCACTGTCTTCCTGGTCCTG | | |
| FURIN_313 | GCAGCAACAGG | 1763 | TTGCTATGGGTGGTAGCAGCAAC | 1863 | human |
| | AACCUUGGU | | AGGAACCTTGGTCCTGCTAGCA | | |
| FURIN_2520 | GAAGGUGUACA | 1764 | TAGTTTTCGGGGGGTGAAGGTGT | 1864 | human |
| | CCAUGGACC | | ACACCATGGACCGTGGCCTCAT | | |
| FURIN_1310 | GCAACCAGAAU | 1765 | CGACCTACAGCAGTGGCAACCA | 1865 | human |
| | GAGAAGCAG | | GAATGAGAAGCAGATCGTGACGA | | |
| FURIN_1752 | CACCCUGUCCU | 1766 | CGCTCAGGCGCGGCTCACCCTGT | 1866 | human |
| | AUAAUCGCC | | CCTATAATCGCCGTGGCGACCT | | |
| FURIN_4166 | AUUGCUGGUUC | 1767 | TTAAACAGGCCCAGCATTGCTGG | 1867 | human |
| | UAUUUAAUG | | TTCTATTTAATGGACATGAGAT | | |
| FURIN_834 | GUACACACAGA | 1768 | TGACCCCCAGCCTCGGTACACAC | 1868 | human |
| | UGAAUGACA | | AGATGAATGACAACAGGCACGG | | |
| FURIN_3517 | CAGGGGCUGUU | 1769 | CCCCTGTGGGGATCTCAGGGGCT | 1869 | human |
| | UGAGGAUAU | | GTTTGAGGATATATTTTCACTT | | |
| FURIN_3550 | GAUUAUUUCAC | 1770 | ATATTTTCACTTTGTGATTATTTC | 1870 | human |
| | UUUAGAUGC | | ACTTTAGATGCTGATGATTTG | | |
| FURIN_2694 | UCCCCUCCUUG | 1771 | ACCCCCTCAAGCCAATCCCCTCC | 1871 | human |
| | GGCACUUUU | | TTGGGCACTTTTTAATTCACCA | | |
| FURIN_578 | UGGCAAAGCGA | 1772 | GGCTGGAACAGCAGGTGGCAAA | 1872 | human |
| | CGGACUAAA | | GCGACGGACTAAACGGGACGTGT | | |
| FURIN_1246 | UUUGGCAACGU | 1773 | AGCAGCGCCACGCAGTTTGGCA | 1873 | human |
| | GCCGUGGUA | | ACGTGCCGTGGTACAGCGAGGCC | | |
| FURIN_1425 | GGAGGCCAAUA | 1774 | CATTGCTCTCACCCTGGAGGCCA | 1874 | human |
| | AGAACCUCA | | ATAAGAACCTCACATGGCGGGA | | |
| FURIN_1018 | AUCCACAUCUA | 1775 | CTGAACCCCAACCACATCCACAT | 1875 | human |
| | CAGUGCCAG | | CTACAGTGCCAGCTGGGGCCCC | | |
| FURIN_1858 | GGGUUUAAUGA | 1776 | GACTACTCCGCAGATGGGTTTAA | 1876 | human |
| | CUGGGCCUU | | TGACTGGGCCTTCATGACAACT | | |
| FURIN_1924 | CUAGAGAUUGA | 1777 | TCTGGCGAGTGGGTCCTAGAGAT | 1877 | human |
| | AAACACCAG | | TGAAAACACCAGCGAAGCCAAC | | |
| FURIN_293 | CCUGGUUGCUA | 1778 | CCATGGAGCTGAGGCCCTGGTTG | 1878 | human |
| | UGGGUGGUA | | CTATGGGTGGTAGCAGCAACAG | | |
| FURIN_790 | GCCAGUUUUGA | 1779 | AATTATGATCCTGGGGCCAGTTT | 1879 | human |
| | UGUCAAUGA | | TGATGTCAATGACCAGGACCCT | | |
| FURIN_962 | AUGGCGAGGUG | 1780 | GGGTGCGCATGCTGGATGGCGA | 1880 | human |
| | ACAGAUGCA | | GGTGACAGATGCAGTGGAGGCAC | | |
| FURIN_1757 | UGUCCUAUAAU | 1781 | AGGCGCGGCTCACCCTGTCCTAT | 1881 | human |
| | CGCCGUGGC | | AATCGCCGTGGCGACCTGGCCA | | |
| FURIN_1848 | CUCCGCAGAUG | 1782 | CAGGCCACATGACTACTCCGCAG | 1882 | human |
| | GGUUUAAUG | | ATGGGTTTAATGACTGGGCCTT | | |
| FURIN_3020 | GUCCCUCUAAA | 1783 | CTCTTGCCCTTCCCTGTCCCTCTA | 1883 | human |
| | GCAAUAAUG | | AAGCAATAATGGTCCCATCCA | | |
| FURIN_3511 | GGAUCUCAGGG | 1784 | TGCTTTCCCCTGTGGGGATCTCA | 1884 | human |
| | GCUGUUUGA | | GGGGCTGTTTGAGGATATATTT | | |
| FURIN_760 | CCGGACUUGGC | 1785 | ATCGAGAAGAACCACCCGGACT | 1885 | human |
| | AGGCAAUUA | | TGGCAGGCAATTATGATCCTGGG | | |
| FURIN_770 | CAGGCAAUUAU | 1786 | ACCACCCGGACTTGGCAGGCAA | 1886 | human |
| | GAUCCUGGG | | TTATGATCCTGGGGCCAGTTTTG | | |
| FURIN_827 | AGCCUCGGUAC | 1787 | AGGACCCTGACCCCCAGCCTCGG | 1887 | human |
| | ACACAGAUG | | TACACACAGATGAATGACAACA | | |
| FURIN_1199 | GCUACACCAAC | 1788 | GCTGCAACTGCGACGGCTACACC | 1888 | human |
| | AGUAUCUAC | | AACAGTATCTACACGCTGTCCA | | |
| FURIN_2459 | UGGUCUUCGUC | 1789 | GCGCCTTCATCGTGCTGGTCTTC | 1889 | human |
| | ACUGUCUUC | | GTCACTGTCTTCCTGGTCCTGC | | |
| FURIN_4106 | UUUGUAAGAUG | 1790 | GCCAGCCCGGCTGGTTTTGTAAG | 1890 | human |
| | CUGGGUUGG | | ATGCTGGGTTGGTGCACAGTGA | | |
| FURIN_4173 | GUUCUAUUUAA | 1791 | GGCCCAGCATTGCTGGTTCTATT | 1891 | human |
| | UGGACAUGA | | TAATGGACATGAGATAATGTTA | | |
| FURIN_4199 | GUUAGAGGUUU | 1792 | TGGACATGAGATAATGTTAGAG | 1892 | human |
| | UAAAGUGAU | | GTTTTAAAGTGATTAAACGTGCA | | |
| FURIN_773 | GCAAUUAUGAU | 1793 | ACCCGGACTTGGCAGGCAATTAT | 1893 | human |
| | CCUGGGGCC | | GATCCTGGGGCCAGTTTTGATG | | |
| FURIN_786 | UGGGGCCAGUU | 1794 | AGGCAATTATGATCCTGGGGCCA | 1894 | human |
| | UUGAUGUCA | | GTTTTGATGTCAATGACCAGGA | | |

TABLE 11D
Host target ACE2-20 nucleotide targets and 45 nucleotide gene target regions

| SE- | | SEQ | | SEQ | |
|---|---|---|---|---|---|
| QUENCE | | ID | | ID | |
| ID | 20 nt Sequence | NO: | 45 nt Gene Region | NO: | Species |
| ACE2_ | UUGGAUUUCAUAC | 1895 | TGACATAGATACTCTTTGGATTT | 2095 | human |
| 52 | CAUGUGG | | CATACCATGTGGAGGCTTTCTT | | |
| ACE2_ | UGUCAAAACUAUG | 1896 | AAAGATATCATTAAATGTCAAA | 2096 | human |
| 2730 | ACUCUGU | | ACTATGACTCTGTTCAGAAAAAA | | |
| ACE2_ | CCUAGCAUUGGAA | 1897 | ATCAGAACCCTGGACCCTAGCAT | 2097 | human |
| 1918 | AAUGUUG | | TGGAAAATGTTGTAGGAGCAAA | | |
| ACE2_ | AUGUAAAUGUUAA | 1898 | AGGTGATTTTGTTGTATGTAAAT | 2098 | human |
| 2674 | UUUCAUG | | GTTAATTTCATGGTATAGAAAA | | |
| ACE2_ | UCUGUUUCUUAAU | 1899 | GGATTTGACTTCTGTTCTGTTTCT | 2099 | human |
| 2849 | AAGGAUU | | TAATAAGGATTTTGTATTAGA | | |
| ACE2_ | CAGGAGUUGACAU | 1900 | ATGGCTACAGAGGATCAGGAGT | 2100 | human |
| 30 | AGAUACU | | TGACATAGATACTCTTTGGATTT | | |
| ACE2_ | AAUGAUUACUCAU | 1901 | CTGTTCCATGTTTCTAATGATTA | 2101 | human |
| 1739 | UCAUUCG | | CTCATTCATTCGATATTACACA | | |
| ACE2_ | AUCGAUAUUAGCA | 1902 | AATCCTTATGCCTCCATCGATAT | 2102 | human |
| 2567 | AAGGAGA | | TAGCAAAGGAGAAAATAATCCA | | |
| ACE2_ | CAUGGUAUAGAAA | 1903 | TGTAAATGTTAATTTCATGGTAT | 2103 | human |
| 2690 | AUAUAAG | | AGAAAATATAAGATGATAAAGA | | |
| ACE2_ | UUUGAAACCAAGA | 1904 | TGTGCGAGTGGCTAATTTGAAAC | 2104 | human |
| 2239 | AUCUCCU | | CAAGAATCTCCTTTAATTTCTT | | |
| ACE2_ | AUGGGAGUGAUAG | 1905 | GTTTTTGGAGTTGTGATGGGAGT | 2105 | human |
| 2465 | UGGUUGG | | GATAGTGGTTGGCATTGTCATC | | |
| ACE2_ | UUGAAGAGAUUAA | 1906 | ATGTGGAACATACCTTTGAAGAG | 2106 | human |
| 906 | ACCAUUA | | ATTAAACCATTATATGAACATC | | |
| ACE2_ | UUUGUUGUAUGUA | 1907 | TCCTCTTGAGGTGATTTTGTTGT | 2107 | human |
| 2666 | AAUGUUA | | ATGTAAATGTTAATTTCATGGT | | |
| ACE2_ | UUCAUGGUAUAGA | 1908 | TATGTAAATGTTAATTTCATGGT | 2108 | human |
| 2688 | AAAUAUA | | ATAGAAAATATAAGATGATAAA | | |
| ACE2_ | CUCUGGAUUUGAC | 1909 | AGTATTTATTTCTGTCTCTGGATT | 2109 | human |
| 2830 | UUCUGUU | | TGACTTCTGTTCTGTTTCTTA | | |
| ACE2_ | UAAACCAUUAUAU | 1910 | TACCTTTGAAGAGATTAAACCAT | 2110 | human |
| 916 | GAACAUC | | TATATGAACATCTTCATGCCTA | | |
| ACE2_ | UUCCUCUUGAGGU | 1911 | GAAAAATCTATGTTTTTCCTCTT | 2111 | human |
| 2650 | GAUUUUG | | GAGGTGATTTTGTTGTATGTAA | | |
| ACE2_ | CAUUAAAUGUCAA | 1912 | AGATGATAAAGATATCATTAAAT | 2112 | human |
| 2723 | AACUAUG | | GTCAAAACTATGACTCTGTTCA | | |
| ACE2_ | GGAGAAAAUAAUC | 1913 | ATCGATATTAGCAAAGGAGAAA | 2113 | human |
| 2582 | CAGGAUU | | ATAATCCAGGATTCCAAAACACT | | |
| ACE2_ | UGGCCAAGGAGAG | 1914 | TGTCCAAAGACAACATGGCCAA | 2114 | human |
| 2778 | AGCAUCU | | GGAGAGAGCATCTTCATTGACAT | | |
| ACE2_ | UCAGGGAUAAUCU | 1915 | GGTCTCACAGGCTGTTCAGGGAT | 2115 | human |
| 2918 | AAAUGUA | | AATCTAAATGTAAATGTCTGTT | | |
| ACE2_ | UUCAAGAAGACAA | 1916 | TTCTGTCACCCGATTTTCAAGAA | 2116 | human |
| 1500 | UGAAACA | | GACAATGAAACAGAAATAAACT | | |
| ACE2_ | AGGACCCUUUACC | 1917 | ATTCGATATTACACAAGGACCCT | 2117 | human |
| 1769 | AAUUCCA | | TTACCAATTCCAGTTTCAAGAA | | |
| ACE2_ | UGUAGGAGCAAAG | 1918 | AGCATTGGAAAATGTTGTAGGA | 2118 | human |
| 1936 | AACAUGA | | GCAAAGAACATGAATGTAAGGCC | | |
| ACE2_ | AGGAGCAAAGAAC | 1919 | ATTGGAAAATGTTGTAGGAGCA | 2119 | human |
| 1939 | AUGAAUG | | AAGAACATGAATGTAAGGCCACT | | |
| ACE2_ | UGGAGAAAAUCCU | 1920 | AAATAAAGCAAGAAGTGGAGAA | 2120 | human |
| 2545 | UAUGCCU | | AATCCTTATGCCTCCATCGATAT | | |
| ACE2_ | GGUGAUUUUGUUG | 1921 | TGTTTTTCCTCTTGAGGTGATTTT | 2121 | human |
| 2660 | UAUGUAA | | GTTGTATGTAAATGTTAATTT | | |
| ACE2_ | UUCUGCAGCCACA | 1922 | GGAAATCATGTCACTTTCTGCAG | 2122 | human |
| 1447 | CCUAAGC | | CCACACCTAAGCATTTAAAATC | | |
| ACE2_ | AAAACUAUGACUC | 1923 | ATATCATTAAATGTCAAAACTAT | 2123 | human |
| 2734 | UGUUCAG | | GACTCTGTTCAGAAAAAAAATT | | |
| ACE2_ | AUCUAAAUGUAAA | 1924 | GGCTGTTCAGGGATAATCTAAAT | 2124 | human |
| 2927 | UGUCUGU | | GTAAATGTCTGTTGAATTTCTG | | |
| ACE2_ | UUAGUCUAGGGAA | 1925 | TCTCATGAGGAGGTTTTAGTCTA | 2125 | human |
| 167 | AGUCAUU | | GGGAAAGTCATTCAGTGGATGT | | |
| ACE2_ | GGAGCAAGUGUUG | 1926 | CAAGGATATATCATTGGAGCAA | 2126 | human |
| 2982 | GAUCUUG | | GTGTTGGATCTTGTATGGAATAT | | |
| ACE2_ | UUUGACUUCUGUU | 1927 | ATTTCTGTCTCTGGATTTGACTTC | 2127 | human |
| 2837 | CUGUUUC | | TGTTCTGTTTCTTAATAAGGA | | |
| ACE2_ | UUUUGUAUUAGAG | 1928 | GTTTCTTAATAAGGATTTTGTAT | 2128 | human |
| 2867 | UAUAUUA | | TAGAGTATATTAGGGAAAGTGT | | |
| ACE2_ | GAGGCCAUUAUAU | 1929 | GGTCGGCAAGCAGCTGAGGCCA | 2129 | human |
| 745 | GAAGAGU | | TTATATGAAGAGTATGTGGTCTT | | |
| ACE2_ | CCAAGAAUCUCCU | 1930 | GTGGCTAATTTGAAACCAAGAAT | 2130 | human |
| 2246 | UUAAUUU | | CTCCTTTAATTTCTTTGTCACT | | |
| ACE2_ | GAUGAUGUUCAGA | 1931 | GGATTCCAAAACACTGATGATGT | 2131 | human |
| 2612 | CCUCCUU | | TCAGACCTCCTTTTAGAAAAAT | | |
| ACE2_ | UCUGGAUUUGACU | 1932 | GTATTTATTTCTGTCTCTGGATTT | 2132 | human |
| 2831 | UCUGUUC | | GACTTCTGTTCTGTTTCTTAA | | |
| ACE2_ | UCCACCAUUGAGG | 1933 | GTAACTGCTGCTCAGTCCACCAT | 2133 | human |
| 272 | AACAGGC | | TGAGGAACAGGCCAAGACATTT | | |
| ACE2_ | UUAUUACUUGAAC | 1934 | AATCCACAAGAATGCTTATTACT | 2134 | human |
| 641 | CAGGUUU | | TGAACCAGGTTTGAATGAAATA | | |
| ACE2_ | UGAACCAGGUUUG | 1935 | AGAATGCTTATTACTTGAACCAG | 2135 | human |
| 649 | AAUGAAA | | GTTTGAATGAAATAATGGCAAA | | |
| ACE2_ | UGUGGGAUGGAGU | 1936 | GAACAAGAATTCTTTTGTGGGAT | 2136 | human |
| 2026 | ACCGACU | | GGAGTACCGACTGGAGTCCATA | | |
| ACE2_ | UGAGGUGAUUUUG | 1937 | CTATGTTTTTCCTCTTGAGGTGAT | 2137 | human |
| 2657 | UUGUAUG | | TTTGTTGTATGTAAATGTTAA | | |
| ACE2_ | UGUAUUUGCUCAC | 1938 | GTCTCTTAAATCTTTTGTATTTGC | 2138 | human |
| 3435 | AGUGUUU | | TCACAGTGTTTGAGCAGTGCT | | |
| ACE2_ | AUUACUUGAACCA | 1939 | TCCACAAGAATGCTTATTACTTG | 2139 | human |
| 643 | GGUUUGA | | AACCAGGTTTGAATGAAATAAT | | |
| ACE2_ | AUGGCAAGAGCAA | 1940 | GTCTTGAAAAATGAGATGGCAA | 2140 | human |
| 785 | AUCAUUA | | GAGCAAATCATTATGAGGACTAT | | |
| ACE2_ | UGGACAGAAACCA | 1941 | TTTGACAGTTCCCTTTGGACAGA | 2141 | human |
| 1072 | AACAUAG | | AACCAAACATAGATGTTACTGA | | |
| ACE2_ | UGUAUUAGAGUAU | 1942 | TCTTAATAAGGATTTTGTATTAG | 2142 | human |
| 2870 | AUUAGGG | | AGTATATTAGGGAAAGTGTGTA | | |
| ACE2_ | AUAUCAUUGGAGC | 1943 | GTTGAAAACAAGGATATATCATT | 2143 | human |
| 2974 | AAGUGUU | | GGAGCAAGTGTTGGATCTTGTA | | |
| ACE2_ | GUAAAUGUUAAUU | 1944 | GTGATTTTGTTGTATGTAAATGT | 2144 | human |
| 2676 | UCAUGGU | | TAATTTCATGGTATAGAAAATA | | |
| ACE2_ | CUUAAUAAGGAUU | 1945 | ACTTCTGTTCTGTTTCTTAATAAG | 2145 | human |
| 2856 | UUGUAUU | | GATTTTGTATTAGAGTATATT | | |
| ACE2_ | CCCAAGUUCAAAG | 1946 | TTGAATAGCGCCCAACCCAAGTT | 2146 | human |
| 122 | GCUGAUA | | CAAAGGCTGATAAGAGAGAAAA | | |
| ACE2_ | UCUGCCAUUUACU | 1947 | CACGATTGTTGGGACTCTGCCAT | 2147 | human |
| 1564 | UACAUGU | | TTACTTACATGTTAGAGAAGTG | | |
| ACE2_ | AAGGCCACUGCUC | 1948 | AAAGAACATGAATGTAAGGCCA | 2148 | human |
| 1960 | AACUACU | | CTGCTCAACTACTTTGAGCCCTT | | |
| ACE2_ | GGGACGAUGUCAA | 1949 | GATCTTGGCTCACAGGGGACGAT | 2149 | human |
| 212 | GCUCUUC | | GTCAAGCTCTTCCTGGCTCCTT | | |
| ACE2_ | CACGAAGCCGAAG | 1950 | TTGGACAAGTTTAACCACGAAGC | 2150 | human |
| 317 | ACCUGUU | | CGAAGACCTGTTCTATCAAAGT | | |
| ACE2_ | ACAAGAAAUUCAG | 1951 | CCAAATGTATCCACTACAAGAA | 2151 | human |
| 472 | AAUCUCA | | ATTCAGAATCTCACAGTCAAGCT | | |
| ACE2_ | UGUGUCUGAUAUC | 1952 | CACTGCACCTAAAAATGTGTCTG | 2152 | human |
| 2287 | AUUCCUA | | ATATCATTCCTAGAACTGAAGT | | |
| ACE2_ | CAGGGAUAAUCUA | 1953 | GTCTCACAGGCTGTTCAGGGATA | 2153 | human |
| 2919 | AAUGUAA | | ATCTAAATGTAAATGTCTGTTG | | |
| ACE2_ | CUGAUAGAAACUC | 1954 | ACTCCCAGAGCATGCCTGATAGA | 2154 | human |
| 3334 | AUUUCUA | | AACTCATTTCTACTGTTCTCTA | | |
| ACE2_ | UAUGAUAUGGCAU | 1955 | ATGGGGCATATCCAGTATGATAT | 2155 | human |
| 1358 | AUGCUGC | | GGCATATGCTGCACAACCTTTT | | |
| ACE2_ | CACGAUUGUUGGG | 1956 | GCTCAAACAAGCACTCACGATTG | 2156 | human |
| 1549 | ACUCUGC | | TTGGGACTCTGCCATTTACTTA | | |
| ACE2_ | GAUGUUCAGACCU | 1957 | TTCCAAAACACTGATGATGTTCA | 2157 | human |
| 2615 | CCUUUUA | | GACCTCCTTTTAGAAAAATCTA | | |
| ACE2_ | AUAAGAUGAUAAA | 1958 | CATGGTATAGAAAATATAAGAT | 2158 | human |
| 2705 | GAUAUCA | | GATAAAGATATCATTAAATGTCA | | |
| ACE2_ | UGAUAAAGAUAUC | 1959 | ATAGAAAATATAAGATGATAAA | 2159 | human |
| 2711 | AUUAAAU | | GATATCATTAAATGTCAAAACTA | | |
| ACE2_ | GUUUCUUAAUAAG | 1960 | TTTGACTTCTGTTCTGTTTCTTAA | 2160 | human |
| 2852 | GAUUUUG | | TAAGGATTTTGTATTAGAGTA | | |
| ACE2_ | UUUGUAUUAGAGU | 1961 | TTTCTTAATAAGGATTTTGTATT | 2161 | human |
| 2868 | AUAUUAG | | AGAGTATATTAGGGAAAGTGTG | | |
| ACE2_ | CUUGGAAUUAUAA | 1962 | AAAGTTCACTTGCTTCTTGGAAT | 2162 | human |
| 357 | CACCAAU | | TATAACACCAATATTACTGAAG | | |
| ACE2_ | AGCCGUAUCAAUG | 1963 | ATCAGGATGTCCCGGAGCCGTAT | 2163 | human |
| 2342 | AUGCUUU | | CAATGATGCTTTCCGTCTGAAT | | |
| ACE2_ | AUUUCUGUCUCUG | 1964 | TTGCTTTCAGTATTTATTTCTGTC | 2164 | human |
| 2822 | GAUUUGA | | TCTGGATTTGACTTCTGTTCT | | |
| ACE2_ | GAGCACAAAGCAG | 1965 | TGTTTGAGCAGTGCTGAGCACAA | 2165 | human |
| 3465 | ACACUCA | | AGCAGACACTCAATAAATGCTA | | |
| ACE2_ | AAAGAUAUCAUUA | 1966 | AAAATATAAGATGATAAAGATA | 2166 | human |
| 2715 | AAUGUCA | | TCATTAAATGTCAAAACTATGAC | | |
| ACE2_ | GUGACCUUGACUG | 1967 | CTTTCTTACTTCCACGTGACCTTG | 2167 | human |
| 90 | AGUUUUG | | ACTGAGTTTTGAATAGCGCCC | | |
| ACE2_ | UGUGGAACAUACC | 1968 | CCAGTTGATTGAAGATGTGGAAC | 2168 | human |
| 892 | UUUGAAG | | ATACCTTTGAAGAGATTAAACC | | |
| ACE2_ | UAUGCUAUGAGGC | 1969 | CGATCATCTGTTGCATATGCTAT | 2169 | human |
| 2162 | AGUACUU | | GAGGCAGTACTTTTTAAAAGTA | | |
| ACE2_ | UUCCAUAUGGCUG | 1970 | TAACCAGCCCCCTGTTTCCATAT | 2170 | human |
| 2434 | AUUGUUU | | GGCTGATTGTTTTTGGAGTTGT | | |
| ACE2_ | ACUACAAUGAGAG | 1971 | TGGCAAACAGTTTAGACTACAAT | 2171 | human |
| 687 | GCUCUGG | | GAGAGGCTCTGGGCTTGGGAAA | | |
| ACE2_ | AUUUGAAACCAAG | 1972 | ATGTGCGAGTGGCTAATTTGAAA | 2172 | human |
| 2238 | AAUCUCC | | CCAAGAATCTCCTTTAATTTCT | | |
| ACE2_ | UGUUGAAUUUCUG | 1973 | CTAAATGTAAATGTCTGTTGAAT | 2173 | human |
| 2944 | AAGUUGA | | TTCTGAAGTTGAAAACAAGGAT | | |
| ACE2_ | CCCAGUCUCUUAA | 1974 | CCTCTGAAGTGGGTACCCAGTCT | 2174 | human |
| 3416 | AUCUUUU | | CTTAAATCTTTTGTATTTGCTC | | |
| ACE2_ | GAUGGGAGUGAUA | 1975 | TGTTTTTGGAGTTGTGATGGGAG | 2175 | human |
| 2464 | GUGGUUG | | TGATAGTGGTTGGCATTGTCAT | | |
| ACE2_ | UGAUGAUGUUCAG | 1976 | AGGATTCCAAAACACTGATGAT | 2176 | human |
| 2611 | ACCUCCU | | GTTCAGACCTCCTTTTAGAAAAA | | |
| ACE2_ | UGCUUCUUGGAAU | 1977 | CTATCAAAGTTCACTTGCTTCTT | 2177 | human |
| 352 | UAUAACA | | GGAATTATAACACCAATATTAC | | |
| ACE2_ | CUAAAUGUAAAUG | 1978 | CTGTTCAGGGATAATCTAAATGT | 2178 | human |
| 2929 | UCUGUUG | | AAATGTCTGTTGAATTTCTGAA | | |
| ACE2_ | AAUGCUGGGGACA | 1979 | GTCCAAAACATGAATAATGCTG | 2179 | human |
| 407 | AAUGGUC | | GGGACAAATGGTCTGCCTTTTTA | | |
| ACE2_ | UUUUCAAGAAGAC | 1980 | TCTTCTGTCACCCGATTTTCAAG | 2180 | human |
| 1498 | AAUGAAA | | AAGACAATGAAACAGAAATAAA | | |
| ACE2_ | UCUUGGAGAUAAA | 1981 | AAGCCTAAAATCAGCTCTTGGAG | 2181 | human |
| 2098 | GCAUAUG | | ATAAAGCATATGAATGGAACGA | | |
| ACE2_ | AAUGAAAUGUACC | 1982 | TATGAATGGAACGACAATGAAA | 2182 | human |
| 2129 | UGUUCCG | | TGTACCTGTTCCGATCATCTGTT | | |
| ACE2_ | AAUAUAAGAUGAU | 1983 | TTTCATGGTATAGAAAATATAAG | 2183 | human |
| 2702 | AAAGAUA | | ATGATAAAGATATCATTAAATG | | |
| ACE2_ | UGUUCUGUUUCUU | 1984 | TCTGGATTTGACTTCTGTTCTGTT | 2184 | human |
| 2846 | AAUAAGG | | TCTTAATAAGGATTTTGTATT | | |
| ACE2_ | UUUGCCUACAGUG | 1985 | CAAGTACTATGGTGATTTGCCTA | 2185 | human |
| 3156 | AUGUUUG | | CAGTGATGTTTGGAATCGATCA | | |
| ACE2_ | AAUCUCAUGAGGA | 1986 | GCTGATAAGAGAGAAAATCTCA | 2186 | human |
| 150 | GGUUUUA | | TGAGGAGGTTTTAGTCTAGGGAA | | |
| ACE2_ | UAAGAUGAUAAAG | 1987 | ATGGTATAGAAAATATAAGATG | 2187 | human |
| 2706 | AUAUCAU | | ATAAAGATATCATTAAATGTCAA | | |
| ACE2_ | GAUGUUUGGAAUC | 1988 | TGATTTGCCTACAGTGATGTTTG | 2188 | human |
| 3168 | GAUCAUG | | GAATCGATCATGCTTTCTTCAA | | |
| ACE2_ | CCACACUUGCCCA | 1989 | TTTTAAAGGAACAGTCCACACTT | 2189 | human |
| 447 | AAUGUAU | | GCCCAAATGTATCCACTACAAG | | |
| ACE2_ | GAGACUAUGAAGU | 1990 | GGGATTATTGGAGAGGAGACTA | 2190 | human |
| 831 | AAAUGGG | | TGAAGTAAATGGGGTAGATGGCT | | |
| ACE2_ | CUUCAUUGACAUU | 1991 | CCAAGGAGAGAGCATCTTCATTG | 2191 | human |
| 2796 | GCUUUCA | | ACATTGCTTTCAGTATTTATTT | | |
| ACE2_ | AAAUGUCUGUUGA | 1992 | GGATAATCTAAATGTAAATGTCT | 2192 | human |
| 2937 | AUUUCUG | | GTTGAATTTCTGAAGTTGAAAA | | |
| ACE2_ | UGUAGCUGCAAGG | 1993 | GTGCCTGGGAACTGGTGTAGCTG | 2193 | human |
| 3049 | AUUGAGA | | CAAGGATTGAGAATGGCATGCA | | |
| ACE2_ | GUUGACAUAGAUA | 1994 | TACAGAGGATCAGGAGTTGACA | 2194 | human |
| 35 | CUCUUUG | | TAGATACTCTTTGGATTTCATAC | | |
| ACE2_ | UGUCCAAAACAUG | 1995 | TATTACTGAAGAGAATGTCCAAA | 2195 | human |
| 391 | AAUAAUG | | ACATGAATAATGCTGGGGACAA | | |
| ACE2_ | GAUGAUAAAGAUA | 1996 | GTATAGAAAATATAAGATGATA | 2196 | human |
| 2709 | UCAUUAA | | AAGATATCATTAAATGTCAAAAC | | |
| ACE2_ | UUGUAUUAGAGUA | 1997 | TTCTTAATAAGGATTTTGTATTA | 2197 | human |
| 2869 | UAUUAGG | | GAGTATATTAGGGAAAGTGTGT | | |
| ACE2_ | UUCACAGUAACUC | 1998 | GGATGACATGCTTTCTTCACAGT | 2198 | human |
| 3124 | AGUUCAA | | AACTCAGTTCAAGTACTATGGT | | |
| ACE2_ | UCAGGAGUUGACA | 1999 | CATGGCTACAGAGGATCAGGAG | 2199 | human |
| 29 | UAGAUAC | | TTGACATAGATACTCTTTGGATT | | |
| ACE2_ | UGUACUCUUUGAC | 2000 | GATTTTGGACAAATCTGTACTCT | 2200 | human |
| 1050 | AGUUCCC | | TTGACAGTTCCCTTTGGACAGA | | |
| ACE2_ | GGAGCUAAUGAAG | 2001 | TTTCTGCTAAGAAATGGAGCTAA | 2201 | human |
| 1400 | GAUUCCA | | TGAAGGATTCCATGAAGCTGTT | | |
| ACE2_ | UGAGCCCUUAUUU | 2002 | ACTGCTCAACTACTTTGAGCCCT | 2202 | human |
| 1981 | ACCUGGC | | TATTTACCTGGCTGAAAGACCA | | |
| ACE2_ | UGCUAUGAGGCAG | 2003 | ATCATCTGTTGCATATGCTATGA | 2203 | human |
| 2164 | UACUUUU | | GGCAGTACTTTTTAAAAGTAAA | | |
| ACE2_ | GUAUGUAAAUGUU | 2004 | TGAGGTGATTTTGTTGTATGTAA | 2204 | human |
| 2672 | AAUUUCA | | ATGTTAATTTCATGGTATAGAA | | |
| ACE2_ | UCUUCAUUGACAU | 2005 | GCCAAGGAGAGAGCATCTTCATT | 2205 | human |
| 2795 | UGCUUUC | | GACATTGCTTTCAGTATTTATT | | |
| ACE2_ | UUUGGUCUCACAG | 2006 | TAGGGAAAGTGTGTATTTGGTCT | 2206 | human |
| 2900 | GCUGUUC | | CACAGGCTGTTCAGGGATAATC | | |
| ACE2_ | UAAGAGAGAAAAU | 2007 | AAGTTCAAAGGCTGATAAGAGA | 2207 | human |
| 140 | CUCAUGA | | GAAAATCTCATGAGGAGGTTTTA | | |
| ACE2_ | CAUGAGAUGGGGC | 2008 | TTCCTGACAGCTCATCATGAGAT | 2208 | human |
| 1337 | AUAUCCA | | GGGGCATATCCAGTATGATATG | | |
| ACE2_ | UUCUAAUGAUUAC | 2009 | ATCTCTGTTCCATGTTTCTAATG | 2209 | human |
| 1735 | UCAUUCA | | ATTACTCATTCATTCGATATTA | | |
| ACE2_ | GUAUCAAUGAUGC | 2010 | GGATGTCCCGGAGCCGTATCAAT | 2210 | human |
| 2346 | UUUCCGU | | GATGCTTTCCGTCTGAATGACA | | |
| ACE2_ | GUUGAAAACAAGG | 2011 | TGTTGAATTTCTGAAGTTGAAAA | 2211 | human |
| 2959 | AUAUAUC | | CAAGGATATATCATTGGAGCAA | | |
| ACE2_ | GAAGAUGUGGAAC | 2012 | CGCGGCCAGTTGATTGAAGATGT | 2212 | human |
| 887 | AUACCUU | | GGAACATACCTTTGAAGAGATT | | |
| ACE2_ | UUUGAAGAGAUUA | 2013 | GATGTGGAACATACCTTTGAAGA | 2213 | human |
| 905 | AACCAUU | | GATTAAACCATTATATGAACAT | | |
| ACE2_ | AGAACAAGAAUUC | 2014 | CCTGGCTGAAAGACCAGAACAA | 2214 | human |
| 2010 | UUUUGUG | | GAATTCTTTTGTGGGATGGAGTA | | |
| ACE2_ | UAGCAAAGGAGAA | 2015 | TGCCTCCATCGATATTAGCAAAG | 2215 | human |
| 2575 | AAUAAUC | | GAGAAAATAATCCAGGATTCCA | | |
| ACE2_ | GAAAACAAGGAUA | 2016 | TGAATTTCTGAAGTTGAAAACAA | 2216 | human |
| 2962 | UAUCAUU | | GGATATATCATTGGAGCAAGTG | | |
| ACE2_ | CAUGCUUUCUUCA | 2017 | ATGTTTGGAATCGATCATGCTTT | 2217 | human |
| 3184 | AGGUGAC | | CTTCAAGGTGACAGGTCTAAAG | | |
| ACE2_ | AACCCAAGUUCAA | 2018 | TTTTGAATAGCGCCCAACCCAAG | 2218 | human |
| 120 | AGGCUGA | | TTCAAAGGCTGATAAGAGAGAA | | |
| ACE2_ | AUGAACAUCUUCA | 2019 | AGATTAAACCATTATATGAACAT | 2219 | human |
| 927 | UGCCUAU | | CTTCATGCCTATGTGAGGGCAA | | |
| ACE2_ | ACUGGGAUCAGAG | 2020 | GTCATCCTGATCTTCACTGGGAT | 2220 | human |
| 2504 | AUCGGAA | | CAGAGATCGGAAGAAGAAAAAT | | |
| ACE2_ | UCUUCAAGGUGAC | 2021 | GAATCGATCATGCTTTCTTCAAG | 2221 | human |
| 3191 | AGGUCUA | | GTGACAGGTCTAAAGAGAGAAG | | |
| ACE2_ | UCAGCAAAAUGGG | 2022 | TCAGCTGCAGGCTCTTCAGCAAA | 2222 | human |
| 517 | UCUUCAG | | ATGGGTCTTCAGTGCTCTCAGA | | |
| ACE2_ | GCAAACAGUUUAG | 2023 | TTGAATGAAATAATGGCAAACA | 2223 | human |
| 674 | ACUACAA | | GTTTAGACTACAATGAGAGGCTC | | |
| ACE2_ | AAACCAUUAUAUG | 2024 | ACCTTTGAAGAGATTAAACCATT | 2224 | human |
| 917 | AACAUCU | | ATATGAACATCTTCATGCCTAT | | |
| ACE2_ | UCUGUACUCUUUG | 2025 | TAGATTTTGGACAAATCTGTACT | 2225 | human |
| 1048 | ACAGUUC | | CTTTGACAGTTCCCTTTGGACA | | |
| ACE2_ | UUUGACAGUUCCC | 2026 | GACAAATCTGTACTCTTTGACAG | 2226 | human |
| 1057 | UUUGGAC | | TTCCCTTTGGACAGAAACCAAA | | |
| ACE2_ | GAAACAGAAAUAA | 2027 | TTTCAAGAAGACAATGAAACAG | 2227 | human |
| 1514 | ACUUCCU | | AAATAAACTTCCTGCTCAAACAA | | |
| ACE2_ | CAGUAUUUAUUUC | 2028 | CATTGACATTGCTTTCAGTATTT | 2228 | human |
| 2814 | UGUCUCU | | ATTTCTGTCTCTGGATTTGACT | | |
| ACE2_ | CAGUUCAAGUACU | 2029 | TTCTTCACAGTAACTCAGTTCAA | 2229 | human |
| 3136 | AUGGUGA | | GTACTATGGTGATTTGCCTACA | | |
| ACE2_ | GUCCAAAACAUGA | 2030 | ATTACTGAAGAGAATGTCCAAA | 2230 | human |
| 392 | AUAAUGC | | ACATGAATAATGCTGGGGACAAA | | |
| ACE2_ | UUGAUGAAUGCCU | 2031 | TATGTGAGGGCAAAGTTGATGA | 2231 | human |
| 959 | AUCCUUC | | ATGCCTATCCTTCCTATATCAGT | | |
| ACE2_ | UGCAUAUGCUAUG | 2032 | GTTCCGATCATCTGTTGCATATG | 2232 | human |
| 2158 | AGGCAGU | | CTATGAGGCAGTACTTTTTAAA | | |
| ACE2_ | UAUGCCUCCAUCG | 2033 | AGTGGAGAAAATCCTTATGCCTC | 2233 | human |
| 2558 | AUAUUAG | | CATCGATATTAGCAAAGGAGAA | | |
| ACE2_ | AGUUGACAUAGAU | 2034 | CTACAGAGGATCAGGAGTTGAC | 2234 | human |
| 34 | ACUCUUU | | ATAGATACTCTTTGGATTTCATA | | |
| ACE2_ | UUUAGUCUAGGGA | 2035 | ATCTCATGAGGAGGTTTTAGTCT | 2235 | human |
| 166 | AAGUCAU | | AGGGAAAGTCATTCAGTGGATG | | |
| ACE2_ | UCCACACUUGCCC | 2036 | TTTTTAAAGGAACAGTCCACACT | 2236 | human |
| 446 | AAAUGUA | | TGCCCAAATGTATCCACTACAA | | |
| ACE2_ | UCUUCUGUCACCC | 2037 | TTTAAAATCCATTGGTCTTCTGT | 2237 | human |
| 1483 | GAUUUUC | | CACCCGATTTTCAAGAAGACAA | | |
| ACE2_ | AUAGAAAAUAUAA | 2038 | TGTTAATTTCATGGTATAGAAAA | 2238 | human |
| 2696 | GAUGAUA | | TATAAGATGATAAAGATATCAT | | |
| ACE2_ | UAUGCUGCACAAC | 2039 | CAGTATGATATGGCATATGCTGC | 2239 | human |
| 1370 | CUUUUCU | | ACAACCTTTTCTGCTAAGAAAT | | |
| ACE2_ | UGGAUUUGACUUC | 2040 | ATTTATTTCTGTCTCTGGATTTGA | 2240 | human |
| 2833 | UGUUCUG | | CTTCTGTTCTGTTTCTTAATA | | |
| ACE2_ | GACUUCUGUUCUG | 2041 | TCTGTCTCTGGATTTGACTTCTGT | 2241 | human |
| 2840 | UUUCUUA | | TCTGTTTCTTAATAAGGATTT | | |
| ACE2_ | CUUUCAUUUAAUC | 2042 | GCATGCATTAGCTCACTTTCATT | 2242 | human |
| 3087 | CAUUGUC | | TAATCCATTGTCAAGGATGACA | | |
| ACE2_ | AAGGAUGACAUGC | 2043 | ATTTAATCCATTGTCAAGGATGA | 2243 | human |
| 3107 | UUUCUUC | | CATGCTTTCTTCACAGTAACTC | | |
| ACE2_ | AGGUAGAGGACAU | 2044 | AAGAATCCAGGGAACAGGTAGA | 2244 | human |
| 3233 | UGCUUUU | | GGACATTGCTTTTTCACTTCCAA | | |
| ACE2_ | UUUGUAUCUGUUG | 2045 | GAGGCCGAGAAGTTCTTTGTATC | 2245 | human |
| 1160 | GUCUUCC | | TGTTGGTCTTCCTAATATGACT | | |
| ACE2_ | AUUCCCAAAGACC | 2046 | GTCTTTAAAGGGGAAATTCCCAA | 2246 | human |
| 1619 | AGUGGAU | | AGACCAGTGGATGAAAAAGTGG | | |
| ACE2_ | AAGACCAGAACAA | 2047 | TATTTACCTGGCTGAAAGACCAG | 2247 | human |
| 2004 | GAAUUCU | | AACAAGAATTCTTTTGTGGGAT | | |
| ACE2_ | UAAAGCAUAUGAA | 2048 | ATCAGCTCTTGGAGATAAAGCAT | 2248 | human |
| 2107 | UGGAACG | | ATGAATGGAACGACAATGAAAT | | |
| ACE2_ | CUGGAUUUGACUU | 2049 | TATTTATTTCTGTCTCTGGATTTG | 2249 | human |
| 2832 | CUGUUCU | | ACTTCTGTTCTGTTTCTTAAT | | |
| ACE2_ | UAGGGAAAGUGUG | 2050 | TGTATTAGAGTATATTAGGGAAA | 2250 | human |
| 2885 | UAUUUGG | | GTGTGTATTTGGTCTCACAGGC | | |
| ACE2_ | GCAUGCAUUAGCU | 2051 | CAAGGATTGAGAATGGCATGCA | 2251 | human |
| 3072 | CACUUUC | | TTAGCTCACTTTCATTTAATCCA | | |
| ACE2_ | UUGGUCUUCCUAA | 2052 | AGTTCTTTGTATCTGTTGGTCTTC | 2252 | human |
| 1170 | UAUGACU | | CTAATATGACTCAAGGATTCT | | |
| ACE2_ | GUUUCUAAUGAUU | 2053 | GCATCTCTGTTCCATGTTTCTAAT | 2253 | human |
| 1733 | ACUCAUU | | GATTACTCATTCATTCGATAT | | |
| ACE2_ | UUACACAAGGACC | 2054 | CTCATTCATTCGATATTACACAA | 2254 | human |
| 1762 | CUUUACC | | GGACCCTTTACCAATTCCAGTT | | |
| ACE2_ | UUGAAACCAAGAA | 2055 | GTGCGAGTGGCTAATTTGAAACC | 2255 | human |
| 2240 | UCUCCUU | | AAGAATCTCCTTTAATTTCTTT | | |
| ACE2_ | UCUGAUAUCAUUC | 2056 | GCACCTAAAAATGTGTCTGATAT | 2256 | human |
| 2291 | CUAGAAC | | CATTCCTAGAACTGAAGTTGAA | | |
| ACE2_ | AGUGCCUGGGAAC | 2057 | ATCACTTGTAAGGACAGTGCCTG | 2257 | human |
| 3033 | UGGUGUA | | GGAACTGGTGTAGCTGCAAGGA | | |
| ACE2_ | UGAGAAUGGCAUG | 2058 | TGTAGCTGCAAGGATTGAGAAT | 2258 | human |
| 3064 | CAUUAGC | | GGCATGCATTAGCTCACTTTCAT | | |
| ACE2_ | UGCAUUAGCUCAC | 2059 | GGATTGAGAATGGCATGCATTA | 2259 | human |
| 3075 | UUUCAUU | | GCTCACTTTCATTTAATCCATTG | | |
| ACE2_ | UCACCCUCUGAAG | 2060 | ATTCCAACTGTATGTTCACCCTC | 2260 | human |
| 3397 | UGGGUAC | | TGAAGTGGGTACCCAGTCTCTT | | |
| ACE2_ | UGAGGAGGUUUUA | 2061 | AGAGAGAAAATCTCATGAGGAG | 2261 | human |
| 157 | GUCUAGG | | GTTTTAGTCTAGGGAAAGTCATT | | |
| ACE2_ | UUUGCUUGGUGAU | 2062 | ATGCCTCCCTGCTCATTTGCTTG | 2262 | human |
| 1012 | AUGUGGG | | GTGATATGTGGGGTAGATTTTG | | |
| ACE2_ | UGGGGCAUAUCCA | 2063 | CAGCTCATCATGAGATGGGGCAT | 2263 | human |
| 1344 | GUAUGAU | | ATCCAGTATGATATGGCATATG | | |
| ACE2_ | AUAUGAAUGGAAC | 2064 | TCTTGGAGATAAAGCATATGAAT | 2264 | human |
| 2113 | GACAAUG | | GGAACGACAATGAAATGTACCT | | |
| ACE2_ | UUUCAUGGUAUAG | 2065 | GTATGTAAATGTTAATTTCATGG | 2265 | human |
| 2687 | AAAAUAU | | TATAGAAAATATAAGATGATAA | | |
| ACE2_ | UACUGAAGAGAAU | 2066 | TTATAACACCAATATTACTGAAG | 2266 | human |
| 379 | GUCCAAA | | AGAATGTCCAAAACATGAATAA | | |
| ACE2_ | GGCAAGAGCAAAU | 2067 | CTTGAAAAATGAGATGGCAAGA | 2267 | human |
| 787 | CAUUAUG | | GCAAATCATTATGAGGACTATGG | | |
| ACE2_ | UGCUGCACAACCU | 2068 | GTATGATATGGCATATGCTGCAC | 2268 | human |
| 1372 | UUUCUGC | | AACCTTTTCTGCTAAGAAATGG | | |
| ACE2_ | AAAGACCAGAACA | 2069 | TTATTTACCTGGCTGAAAGACCA | 2269 | human |
| 2003 | AGAAUUC | | GAACAAGAATTCTTTTGTGGGA | | |
| ACE2_ | AACGACAAUGAAA | 2070 | AAAGCATATGAATGGAACGACA | 2270 | human |
| 2123 | UGUACCU | | ATGAAATGTACCTGTTCCGATCA | | |
| ACE2_ | UGUGCGAGUGGCU | 2071 | TTTTGGGGAGGAGGATGTGCGA | 2271 | human |
| 2224 | AAUUUGA | | GTGGCTAATTTGAAACCAAGAAT | | |
| ACE2_ | UUAGCAAAGGAGA | 2072 | ATGCCTCCATCGATATTAGCAAA | 2272 | human |
| 2574 | AAAUAAU | | GGAGAAAATAATCCAGGATTCC | | |
| ACE2_ | GGAACAGGUAGAG | 2073 | GAGAGAAGAATCCAGGGAACAG | 2273 | human |
| 3228 | GACAUUG | | GTAGAGGACATTGCTTTTTCACT | | |
| ACE2_ | CUUAAAUCUUUUG | 2074 | GTGGGTACCCAGTCTCTTAAATC | 2274 | human |
| 3424 | UAUUUGC | | TTTTGTATTTGCTCACAGTGTT | | |
| ACE2_ | UAUCCACUACAAG | 2075 | ACACTTGCCCAAATGTATCCACT | 2275 | human |
| 464 | AAAUUCA | | ACAAGAAATTCAGAATCTCACA | | |
| ACE2_ | AAACCAAACAUAG | 2076 | GTTCCCTTTGGACAGAAACCAAA | 2276 | human |
| 1079 | AUGUUAC | | CATAGATGTTACTGATGCAATG | | |
| ACE2_ | CAAGGAUUCUGGG | 2077 | CTTCCTAATATGACTCAAGGATT | 2277 | human |
| 1190 | AAAAUUC | | CTGGGAAAATTCCATGCTAACG | | |
| ACE2_ | ACCAGAACAAGAA | 2078 | TTACCTGGCTGAAAGACCAGAA | 2278 | human |
| 2007 | UUCUUUU | | CAAGAATTCTTTTGTGGGATGGA | | |
| ACE2_ | AUGUUAAUUUCAU | 2079 | TTTTGTTGTATGTAAATGTTAATT | 2279 | human |
| 2680 | GGUAUAG | | TCATGGTATAGAAAATATAAG | | |
| ACE2_ | GAUAUCAUUAAAU | 2080 | ATATAAGATGATAAAGATATCAT | 2280 | human |
| 2718 | GUCAAAA | | TAAATGTCAAAACTATGACTCT | | |
| ACE2_ | UUAAAUGUCAAAA | 2081 | ATGATAAAGATATCATTAAATGT | 2281 | human |
| 2725 | CUAUGAC | | CAAAACTATGACTCTGTTCAGA | | |
| ACE2_ | CAGGCUGUUCAGG | 2082 | GTGTATTTGGTCTCACAGGCTGT | 2282 | human |
| 2910 | GAUAAUC | | TCAGGGATAATCTAAATGTAAA | | |
| ACE2_ | UGUCAAGGAUGAC | 2083 | TTTCATTTAATCCATTGTCAAGG | 2283 | human |
| 3103 | AUGCUUU | | ATGACATGCTTTCTTCACAGTA | | |
| ACE2_ | AUGGUGAUUUGCC | 2084 | CTCAGTTCAAGTACTATGGTGAT | 2284 | human |
| 3149 | UACAGUG | | TTGCCTACAGTGATGTTTGGAA | | |
| ACE2_ | UUGGACAAAUCUG | 2085 | TATGTGGGGTAGATTTTGGACAA | 2285 | human |
| 1039 | UACUCUU | | ATCTGTACTCTTTGACAGTTCC | | |
| ACE2_ | UCAAGAAGCACUU | 2086 | TTACCAATTCCAGTTTCAAGAAG | 2286 | human |
| 1792 | UGUCAAG | | CACTTTGTCAAGCAGCTAAACA | | |
| ACE2_ | UUUAAUUUCUUUG | 2087 | AAACCAAGAATCTCCTTTAATTT | 2287 | human |
| 2258 | UCACUGC | | CTTTGTCACTGCACCTAAAAAT | | |
| ACE2_ | GCAAGGAUUGAGA | 2088 | GGAACTGGTGTAGCTGCAAGGA | 2288 | human |
| 3056 | AUGGCAU | | TTGAGAATGGCATGCATTAGCTC | | |
| ACE2_ | UUGGAAUCGAUCA | 2089 | TGCCTACAGTGATGTTTGGAATC | 2289 | human |
| 3173 | UGCUUUC | | GATCATGCTTTCTTCAAGGTGA | | |
| ACE2_ | UCUCAUGAGGAGG | 2090 | TGATAAGAGAGAAAATCTCATG | 2290 | human |
| 152 | UUUUAGU | | AGGAGGTTTTAGTCTAGGGAAAG | | |
| ACE2_ | CAUUAUAUGAAGA | 2091 | GCAAGCAGCTGAGGCCATTATAT | 2291 | human |
| 750 | GUAUGUG | | GAAGAGTATGTGGTCTTGAAAA | | |
| ACE2_ | UCUGGGAAAAUUC | 2092 | ATATGACTCAAGGATTCTGGGAA | 2292 | human |
| 1197 | CAUGCUA | | AATTCCATGCTAACGGACCCAG | | |
| ACE2_ | UUCAGGAUCCUUA | 2093 | CTGGGGAAGGGCGACTTCAGGA | 2293 | human |
| 1283 | UGUGCAC | | TCCTTATGTGCACAAAGGTGACA | | |
| ACE2_ | AGGCCCUCUGCAC | 2094 | AGCAGCTAAACATGAAGGCCCT | 2294 | human |
| 1825 | AAAUGUG | | CTGCACAAATGTGACATCTCAAA | | |

TABLE 12A
Host targets screened-TMPRSS-20 nucleotide targets and 45 nucleotide gene
target regions

| | | SEQ | | SEQ | |
|---|---|---|---|---|---|
| Sequence | | ID | | ID | |
| ID | Sequence | NO: | Gene Region | NO: | Species |
| TMPRSS | UGUGAAAAUGA | 2295 | ACTGTAAAGTTCAATTGTGAAAAT | 2331 | human |
| 2_3153 | AUAUCAUGC | | GAATATCATGCAAATAAATTA | | |
| TMPRSS | ACCUUCAUUUA | 2296 | GTCTCCAAGTAGTCCACCTTCATT | 2332 | human |
| 2_2577 | ACUCUUUGA | | TAACTCTTTGAAACTGTATCA | | |
| TMPRSS | UCGUCCUUGACG | 2297 | TAATCCACATGGTCTTCGTCCTTG | 2333 | human |
| 2_1626 | UCGUUUUA | | ACGTCGTTTTACAAGAAAACA | | |
| TMPRSS | GGAGCCGGAUA | 2298 | TCTTTCATGTTCTATGGAGCCGGA | 2334 | human |
| 2_1101 | CCAAGUAGA | | TACCAAGTAGAAAAAGTGATT | | |
| TMPRSS | UACCACAGUGA | 2299 | ATCTATAAAAAACTGTACCACAGT | 2335 | human |
| 2_810 | UGCCUGUUC | | GATGCCTGTTCTTCAAAAGCA | | |
| TMPRSS | UCAUGCAAAUA | 2300 | TTGTGAAAATGAATATCATGCAAA | 2336 | human |
| 2_3167 | AAUUAUGCA | | TAAATTATGCAATTTTTTTTT | | |
| TMPRSS | UUGAAACUGUA | 2301 | CCTTCATTTAACTCTTTGAAACTGT | 2337 | human |
| 2_593 | UCAUCUUUG | | ATCATCTTTGCCAAGTAAGA | | |
| TMPRSS | GCCGGCAAUGUC | 2302 | AAACTGAACACAAGTGCCGGCAA | 2338 | human |
| 2_780 | GAUAUCUA | | TGTCGATATCTATAAAAAACTG | | |
| TMPRSS | UGUAAUGGUGA | 2303 | CATCCTAAAAGGTGTTGTAATGGT | 2339 | human |
| 2_3054 | AAACGUCUU | | GAAAACGTCTTCCTTCTTTAT | | |
| TMPRSS | GGUGGCCUAUU | 2304 | TTGCCAAGTAAGAGTGGTGGCCTA | 2340 | human |
| 2_2625 | UCAGCUGCU | | TTTCAGCTGCTTTGACAAAAT | | |
| TMPRSS | ACAGCUAGGAC | 2305 | GAAATGAATGATTCTACAGCTAGG | 2341 | human |
| 2_2899 | UUAACCUUG | | ACTTAACCTTGAAATGGAAAG | | |
| TMPRSS | CAGUUUAAGGU | 2306 | GAAATCAAGGATGCTCAGTTTAAG | 2342 | human |
| 2_2485 | ACACUGUUU | | GTACACTGTTTCCATGTTATG | | |
| TMPRSS | GCCGCCAGAGCA | 2307 | TCAACTTGAACTCAAGCCGCCAGA | 2343 | human |
| 2_886 | GGAUUGUG | | GCAGGATTGTGGGCGGCGAGA | | |
| TMPRSS | CCAGCCAUGAUC | 2308 | GACAACCTGATCACACCAGCCATG | 2344 | human |
| 2_1398 | UGUGCCGG | | ATCTGTGCCGGCTTCCTGCAG | | |
| TMPRSS | UCCAUCAUCACC | 2309 | CACGTGTGCGGAGGCTCCATCATC | 2345 | human |
| 2_984 | CCCGAGUG | | ACCCCCGAGTGGATCGTGACA | | |
| TMPRSS | AUGAUCUGUGC | 2310 | CTGATCACACCAGCCATGATCTGT | 2346 | human |
| 2_1404 | CGGCUUCCU | | GCCGGCTTCCTGCAGGGGAAC | | |
| TMPRSS | GCUUUGAACUC | 2311 | GATAACAGCAAGATGGCTTTGAA | 2347 | human |
| 2_138 | AGGGUCACC | | CTCAGGGTCACCACCAGCTATT | | |
| TMPRSS | AGGAGAAAGGG | 2312 | GGTGGGGGGCCACCGAGGAGAAA | 2348 | human |
| 2_1297 | AAGACCUCA | | GGGAAGACCTCAGAAGTGCTGA | | |
| TMPRSS | CCUGGCAGGUCA | 2313 | TCCCGGGGGCCTGGCCCTGGCAGG | 2349 | human |
| 2_937 | GCCUGCAC | | TCAGCCTGCACGTCCAGAACG | | |
| TMPRSS | GAGGAGAAAGG | 2314 | GGGTGGGGGGCCACCGAGGAGAA | 2350 | human |
| 2_1296 | GAAGACCUC | | AGGGAAGACCTCAGAAGTGCTG | | |
| TMPRSS | CAGGUCAGCCUG | 2315 | GGGGCCTGGCCCTGGCAGGTCAG | 2351 | human |
| 2_942 | CACGUCCA | | CCTGCACGTCCAGAACGTCCAC | | |
| TMPRSS | CAUUGGACGGC | 2316 | CTTAACAATCCATGGCATTGGACG | 2352 | human |
| 2_1053 | AUUUGCGGG | | GCATTTGCGGGGATTTTGAGA | | |
| TMPRSS | GAGGCUCCAUCA | 2317 | ACGTCCACGTGTGCGGAGGCTCCA | 2353 | human |
| 2_979 | UCACCCCC | | TCATCACCCCCGAGTGGATCG | | |
| TMPRSS | CAUGAUCUGUG | 2318 | CCTGATCACACCAGCCATGATCTG | 2354 | human |
| 2_1403 | CCGGCUUCC | | TGCCGGCTTCCTGCAGGGGAA | | |
| TMPRSS | ACCAGCCAUGAU | 2319 | TGACAACCTGATCACACCAGCCAT | 2355 | human |
| 2_1397 | CUGUGCCG | | GATCTGTGCCGGCTTCCTGCA | | |
| TMPRSS | AAAGCCAUGCCA | 962 | TGGGTTTATACCAGGAAAGCCATG | 1162 | mouse |
| 2_2779 | GAAUUACC | | CCAGAATTACCAAATATGAAG | | |
| TMPRSS | UUUGUCUUCAA | 2320 | TTGTCCCAGACTTCCTTTGTCTTCA | 2356 | mouse |
| 2_1730 | CAACCUUCU | | ACAACCTTCTGCAAGAAAAC | | |
| TMPRSS | UGCACAAUGUA | 2321 | AATTTTAACTTCCTGTGCACAATG | 2357 | mouse |
| 2_1785 | CCUUUUGAG | | TACCTTTTGAGATGATTCGAA | | |
| TMPRSS | UGGGACAGCAA | 2322 | TTGCTTTGGAGGTTCTGGGACAGC | 2358 | mouse |
| 2_552 | CUGUUCUAC | | AACTGTTCTACGTCTGAGATG | | |
| TMPRSS | UUCCACUGUGA | 2323 | TTCTGAGCTGTGAGATTCCACTGT | 2359 | mouse |
| 2_3120 | AAUAUAUGA | | GAAATATATGAATAAAGTATA | | |
| TMPRSS | UCAGGCAACGU | 2324 | AAGCTGAATGTGAGCTCAGGCAA | 2360 | mouse |
| 2_873 | UGACCUCUA | | CGTTGACCTCTATAAAAAACTC | | |
| TMPRSS | GGGAACGUGAC | 2325 | AGACCTGGAGTATACGGGAACGT | 2361 | mouse |
| 2_1647 | GGUAUUUAC | | GACGGTATTTACAGATTGGATC | | |
| TMPRSS | UCUGCAAGAAA | 2326 | TGTCTTCAACAACCTTCTGCAAGA | 2362 | mouse |
| 2_1747 | ACCAAGGGC | | AAACCAAGGGCCTGAATTTTA | | |
| TMPRSS | UUUGGCUUUUA | 2327 | GAAGCTGCAGACACCTTTGGCTTT | 2363 | mouse |
| 2_1286 | AUGAUCUAG | | TAATGATCTAGTGAAGCCAGT | | |
| TMPRSS | UAAGCGAGAAC | 2328 | CCGCCTCCGGAGATTTAAGCGAGA | 2364 | mouse |
| 2_88 | UGGAGUAGG | | ACTGGAGTAGGTCGTGTACTT | | |
| TMPRSS | GUUGACAUGAC | 2329 | CTTGCTCTCCTGCATGTTGACATG | 2365 | mouse |
| 2_2243 | GGCCCUUUC | | ACGGCCCTTTCCAAGGGTGAT | | |
| TMPRSS | UGCUUCUGGGU | 2330 | TGATTTCAGTCACCTTGCTTCTGG | 2366 | mouse |
| 2_2539 | UGUGUUUCU | | GTTGTGTTTCTTCTCTTACTA | | |

TABLE 12B
Host targets screened - IL-6-20 nucleotide targets and 45 nucleotide
gene target regions

| Se- | | SEQ | | SEQ | |
|---|---|---|---|---|---|
| quence | | ID | | ID | |
| ID | Sequence | NO: | Gene Region | NO: | Species |
| IL6_ | UUGGAAAGUGUA | 2367 | GAGCCAGATCATTTCTTGGAAAG | 2389 | human |
| 933 | GGCUUACC | | TGTAGGCTTACCTCAAATAAAT | | |
| IL6_ | CUUGAAAUGUUA | 2368 | TTTTATGAAGTGTCACTTGAAAT | 2390 | mouse |
| 930 | UAUGUUAU | | GTTATATGTTATAGTTTTGAAA | | |
| IL6_ | UAUGAUUGAUAU | 2369 | AACTTTAAGTTAATTTATGATTG | 2391 | mouse |
| 896 | UUAUUAUU | | ATATTTATTATTTTTATGAAGT | | |
| IL6_ | UUAAAUAAGUAA | 2370 | TAATTTATTGATAATTTAAATAA | 2392 | mouse |
| 870 | ACUUUAAG | | GTAAACTTTAAGTTAATTTATG | | |
| IL6_ | GACACUAUUUUA | 2371 | CAATATGAATGTTGGGACACTAT | 2393 | mouse |
| 835 | AUUAUUUU | | TTTAATTATTTTTAATTTATTG | | |
| IL6_ | GGACACUAUUUU | 2372 | ACAATATGAATGTTGGGACACTA | 2394 | mouse |
| 834 | AAUUAUUU | | TTTTAATTATTTTTAATTTATT | | |
| IL6_ | UGGGACACUAUU | 2373 | TGACAATATGAATGTTGGGACAC | 2395 | mouse |
| 832 | UUAAUUAU | | TATTTTAATTATTTTTAATTTA | | |
| IL6_ | GUGGACAUUCCUC | 2374 | TAAGCATATCAGTTTGTGGACAT | 2396 | mouse |
| 741 | ACUGUGG | | TCCTCACTGTGGTCAGAAAATA | | |
| IL6_ | UGAAGAAUUUCU | 2375 | CATCTTGAAATCACTTGAAGAAT | 2397 | mouse |
| 669 | AAAAGUCA | | TTCTAAAAGTCACTTTGAGATC | | |
| IL6_ | AUGGGCACCUCAG | 2376 | TTCGGCAAATGTAGCATGGGCAC | 2398 | human |
| 635 | AUUGUUG | | CTCAGATTGTTGTTGTTAATGG | | |
| IL6_ | UCGGCAAAUGUA | 2377 | CAGCCTGAGGGCTCTTCGGCAAA | 2399 | human |
| 621 | GCAUGGGC | | TGTAGCATGGGCACCTCAGATT | | |
| IL6_ | UCGGCAAAUGUA | 2377 | CAGCCTGAGGGCTCTTCGGCAAA | 2399 | human |
| 621 | GCAUGGGC | | TGTAGCATGGGCACCTCAGATT | | |
| IL6_ | GAUAUAAUCAGG | 2378 | GATGCTACCAAACTGGATATAAT | 2400 | mouse |
| 386 | AAAUUUGC | | CAGGAAATTTGCCTATTGAAAA | | |
| IL6_ | UGAGGUAUACCU | 2379 | TGGTCTTTTGGAGTTTGAGGTAT | 2401 | human |
| 360 | AGAGUACC | | ACCTAGAGTACCTCCAGAACAG | | |
| IL6_ | GGUGAAAAUCAU | 2380 | TGAGGAGACTTGCCTGGTGAAAA | 2402 | human |
| 330 | CACUGGUC | | TCATCACTGGTCTTTTGGAGTT | | |
| IL6_ | GGUGAAAAUCAU | 2380 | TGAGGAGACTTGCCTGGTGAAAA | 2402 | human |
| 330 | CACUGGUC | | TCATCACTGGTCTTTTGGAGTT | | |
| IL6_ | CUUGCCUGGUGAA | 2381 | GATTCAATGAGGAGACTTGCCTG | 2403 | human |
| 323 | AAUCAUC | | GTGAAAATCATCACTGGTCTTT | | |
| IL6_ | CUUGCCUGGUGAA | 2381 | GATTCAATGAGGAGACTTGCCTG | 2403 | human |
| 323 | AAUCAUC | | GTGAAAATCATCACTGGTCTTT | | |
| IL6_ | UGUGCAAUGGCA | 2382 | AAATGAGAAAAGAGTTGTGCAA | 2404 | mouse |
| 284 | AUUCUGAU | | TGGCAATTCTGATTGTATGAACA | | |
| IL6_ | UGAACCUUCCAAA | 2383 | TGGCAGAAAACAACCTGAACCTT | 2405 | human |
| 263 | GAUGGCU | | CCAAAGATGGCTGAAAAAGATG | | |
| IL6_ | ACUGGCAGAAAAC | 2384 | AAGCAGCAAAGAGGCACTGGCA | 2406 | human |
| 246 | AACCUGA | | GAAAACAACCTGAACCTTCCAAA | | |
| IL6_ | ACUGGCAGAAAAC | 2384 | AAGCAGCAAAGAGGCACTGGCA | 2406 | human |
| 246 | AACCUGA | | GAAAACAACCTGAACCTTCCAAA | | |
| IL6_ | GAAAGCAGCAAA | 2385 | AAGAGTAACATGTGTGAAAGCA | 2407 | human |
| 229 | GAGGCACU | | GCAAAGAGGCACTGGCAGAAAAC | | |
| IL6_ | GAAAGCAGCAAA | 2385 | AAGAGTAACATGTGTGAAAGCA | 2407 | human |
| 229 | GAGGCACU | | GCAAAGAGGCACTGGCAGAAAAC | | |
| IL6_ | UCAGCCCUGAGAA | 2386 | ATCCTCGACGGCATCTCAGCCCT | 2408 | human |
| 187 | AGGAGAC | | GAGAAAGGAGACATGTAACAAG | | |
| IL6_ | UGCUAAUUUAAA | 2387 | TTTACCTCAATGAATTGCTAATTT | 2409 | mouse |
| 1045 | UAUGUUUU | | AAATATGTTTTTAAAGAAATC | | |
| IL6_ | CUUGGAAUGUAU | 2388 | CTAGCCAGATGGTTTCTTGGAAT | 2410 | mouse |
| 1015 | AAGUUUAC | | GTATAAGTTTACCTCAATGAAT | | |

TABLE 12C
Host targets screened - ACE2_-20 nucleotide targets and 45 nucleotide
gene target regions

| Se- | | SEQ | | SEQ | |
|---|---|---|---|---|---|
| quence | | ID | | ID | |
| ID | Sequence | NO: | Gene Region | NO: | Species |
| ACE2_ | CAACCCAAGUUC | 2411 | GTTTTGAATAGCGCCCAACCCAAG | 2435 | human |
| 119 | AAAGGCUG | | TTCAAAGGCTGATAAGAGAGA | | |
| ACE2_ | UCUAUCAAAGUU | 2412 | AAGCCGAAGACCTGTTCTATCAAA | 2436 | human |
| 336 | CACUUGCU | | GTTCACTTGCTTCTTGGAATT | | |
| ACE2_ | ACUUGCUUCUUG | 2413 | GTTCTATCAAAGTTCACTTGCTTCT | 2437 | human |
| 349 | GAAUUAUA | | TGGAATTATAACACCAATAT | | |
| ACE2_ | UUGGAAUUAUAA | 2414 | AAGTTCACTTGCTTCTTGGAATTA | 2438 | human |
| 358 | CACCAAUA | | TAACACCAATATTACTGAAGA | | |
| ACE2_ | AAUCCACAAGAA | 2415 | GTTTGTAACCCAGATAATCCACAA | 2439 | human |
| 626 | UGCUUAUU | | GAATGCTTATTACTTGAACCA | | |
| ACE2_ | GAUGGCAAGAGC | 2416 | GGTCTTGAAAAATGAGATGGCAA | 2440 | human |
| 784 | AAAUCAUU | | GAGCAAATCATTATGAGGACTA | | |
| ACE2_ | GAAGAGAUUAAA | 2417 | GTGGAACATACCTTTGAAGAGATT | 2441 | human |
| 908 | CCAUUAUA | | AAACCATTATATGAACATCTT | | |
| ACE2_ | AGAUUUUGGACA | 2418 | GGTGATATGTGGGGTAGATTTTGG | 2442 | human |
| 1034 | AAUCUGUA | | ACAAATCTGTACTCTTTGACA | | |
| ACE2_ | UUGGACAGAAAC | 2419 | CTTTGACAGTTCCCTTTGGACAGA | 2443 | human |
| 1071 | CAAACAUA | | AACCAAACATAGATGTTACTG | | |
| ACE2_ | CCUAAUAUGACU | 2420 | GTATCTGTTGGTCTTCCTAATATG | 2444 | human |
| 1178 | CAAGGAUU | | ACTCAAGGATTCTGGGAAAAT | | |
| ACE2_ | UCUGCUAAGAAA | 2421 | TGCTGCACAACCTTTTCTGCTAAG | 2445 | human |
| 1387 | UGGAGCUA | | AAATGGAGCTAATGAAGGATT | | |
| ACE2_ | GGGGAAAUCAUG | 2422 | TTCCATGAAGCTGTTGGGGAAATC | 2446 | human |
| 1430 | UCACUUUC | | ATGTCACTTTCTGCAGCCACA | | |
| ACE2_ | UGAAACAGAAAU | 2423 | TTTTCAAGAAGACAATGAAACAG | 2447 | human |
| 1513 | AAACUUCC | | AAATAAACTTCCTGCTCAAACA | | |
| ACE2_ | UCACGAUUGUUG | 2424 | TGCTCAAACAAGCACTCACGATTG | 2448 | human |
| 1548 | GGACUCUG | | TTGGGACTCTGCCATTTACTT | | |
| ACE2_ | GUGGAGGUGGAU | 2425 | TTACATGTTAGAGAAGTGGAGGTG | 2449 | human |
| 1591 | GGUCUUUA | | GATGGTCTTTAAAGGGGAAAT | | |
| ACE2_ | CUAAUGAUUACU | 2426 | CTCTGTTCCATGTTTCTAATGATTA | 2450 | human |
| 1737 | CAUUCAUU | | CTCATTCATTCGATATTACA | | |
| ACE2_ | UUCGAUAUUACA | 2427 | ATGATTACTCATTCATTCGATATT | 2451 | human |
| 1755 | CAAGGACC | | ACACAAGGACCCTTTACCAAT | | |
| ACE2_ | CUUUACCAAUUC | 2428 | TATTACACAAGGACCCTTTACCAA | 2452 | human |
| 1775 | CAGUUUCA | | TTCCAGTTTCAAGAAGCACTT | | |
| ACE2_ | CUGCACAAAUGU | 2429 | AAACATGAAGGCCCTCTGCACAA | 2453 | human |
| 1832 | GACAUCUC | | ATGTGACATCTCAAACTCTACA | | |
| ACE2_ | UAGAAAAUAUAA | 2430 | GTTAATTTCATGGTATAGAAAATA | 2454 | human |
| 2697 | GAUGAUAA | | TAAGATGATAAAGATATCATT | | |
| ACE2_ | AUGGCCAAGGAG | 2431 | TTGTCCAAAGACAACATGGCCAAG | 2455 | human |
| 2777 | AGAGCAUC | | GAGAGAGCATCTTCATTGACA | | |
| ACE2_ | AUUGACAUUGCU | 2432 | GGAGAGAGCATCTTCATTGACATT | 2456 | human |
| 2800 | UUCAGUAU | | GCTTTCAGTATTTATTTCTGT | | |
| ACE2_ | UUCAGUAUUUAU | 2433 | TTCATTGACATTGCTTTCAGTATTT | 2457 | human |
| 2812 | UUCUGUCU | | ATTTCTGTCTCTGGATTTGA | | |
| ACE2_ | UUUGGAAUCGAU | 2434 | TTGCCTACAGTGATGTTTGGAATC | 2458 | human |
| 3172 | CAUGCUUU | | GATCATGCTTTCTTCAAGGTG | | |

TABLE 12D
Host targets screened - FURIN-20 nucleotide targets and 45 nucleotide
gene target regions

| Se- | | SEQ | | SEQ | |
|---|---|---|---|---|---|
| quence | | ID | | ID | |
| ID | Sequence | NO: | Gene Region | NO: | Species |
| FURIN_ | UCAACCUGGG | 2459 | GGAAGCATGGGTTCCTCAACCTGG | 2483 | human |
| 443 | CCAGAUCUUC | | GCCAGATCTTCGGGGACTATT | | |
| FURIN_ | AUUACCACUU | 2460 | AGATCTTCGGGGACTATTACCACTT | 2484 | human |
| 470 | CUGGCAUCGA | | CTGGCATCGAGGAGTGACGA | | |
| FURIN_ | GCAGGCAAUU | 2461 | AACCACCCGGACTTGGCAGGCAAT | 2485 | human |
| 769 | AUGAUCCUGG | | TATGATCCTGGGGCCAGTTTT | | |
| FURIN_ | UUUGAUGUCA | 2462 | GATCCTGGGGCCAGTTTTGATGTCA | 2486 | human |
| 796 | AUGACCAGGA | | ATGACCAGGACCCTGACCCC | | |
| FURIN_ | GAGGCCAAUA | 2463 | ATTGCTCTCACCCTGGAGGCCAAT | 2487 | human |
| 1426 | AGAACCUCAC | | AAGAACCTCACATGGCGGGAC | | |
| FURIN_ | UUCAUGACAA | 2464 | TTTAATGACTGGGCCTTCATGACAA | 2488 | human |
| 1876 | CUCAUUCCUG | | CTCATTCCTGGGATGAGGAT | | |
| FURIN_ | UGGGACGCUG | 2465 | CGAAGCCAACAACTATGGGACGCT | 2489 | human |
| 1959 | ACCAAGUUCA | | GACCAAGTTCACCCTCGTACT | | |
| FURIN_ | UGACCAAGUU | 2466 | ACAACTATGGGACGCTGACCAAGT | 2490 | human |
| 1967 | CACCCUCGUA | | TCACCCTCGTACTCTATGGCA | | |
| FURIN_ | UUUUAAUUCA | 2467 | CCCTCCTTGGGCACTTTTTAATTCA | 2491 | human |
| 2711 | CCAAAGUAUU | | CCAAAGTATTTTTTTATCTT | | |
| FURIN_ | UUUAAUUCAC | 2468 | CCTCCTTGGGCACTTTTTAATTCAC | 2492 | human |
| 2712 | CAAAGUAUUU | | CAAAGTATTTTTTTATCTTG | | |
| FURIN_ | UGUUUGAGGA | 2469 | GGGGATCTCAGGGGCTGTTTGAGG | 2493 | human |
| 3524 | UAUAUUUUCA | | ATATATTTTCACTTTGTGATT | | |
| FURIN_ | UUUGAGGAUA | 2470 | GGATCTCAGGGGCTGTTTGAGGAT | 2494 | human |
| 3526 | UAUUUUCACU | | ATATTTTCACTTTGTGATTAT | | |
| FURIN_ | UGAGGAUAUA | 2471 | ATCTCAGGGGCTGTTTGAGGATAT | 2495 | human |
| 3528 | UUUUCACUUU | | ATTTTCACTTTGTGATTATTT | | |
| FURIN_ | UUUCACUUUG | 2472 | TGTTTGAGGATATATTTTCACTTTG | 2496 | human |
| 3539 | UGAUUAUUUC | | TGATTATTTCACTTTAGATG | | |
| FURIN_ | UAUUUCACUU | 2473 | TTTTCACTTTGTGATTATTTCACTTT | 2497 | human |
| 3553 | UAGAUGCUGA | | AGATGCTGATGATTTGTTT | | |
| FURIN_ | UUAGAUGCUG | 2474 | TGTGATTATTTCACTTTAGATGCTG | 2498 | human |
| 3562 | AUGAUUUGUU | | ATGATTTGTTTTTGTATTTT | | |
| FURIN_ | CUGGUUUUGU | 2475 | TCGTGGCCAGCCCGGCTGGTTTTGT | 2499 | human |
| 4101 | AAGAUGCUGG | | AAGATGCTGGGTTGGTGCAC | | |
| FURIN_ | UGGGUUGGUG | 2476 | GGTTTTGTAAGATGCTGGGTTGGTG | 2500 | human |
| 4118 | CACAGUGAUU | | CACAGTGATTTTTTTCTTGT | | |
| FURIN_ | CUUGUAAUUU | 2477 | CACAGTGATTTTTTTCTTGTAATTT | 2501 | human |
| 4143 | AAACAGGCCC | | AAACAGGCCCAGCATTGCTG | | |
| FURIN_ | UUAAACAGGC | 2478 | TTTTTTTCTTGTAATTTAAACAGGC | 2502 | human |
| 4151 | CCAGCAUUGC | | CCAGCATTGCTGGTTCTATT | | |
| FURIN_ | CCCAGCAUUG | 2479 | TGTAATTTAAACAGGCCCAGCATT | 2503 | human |
| 4160 | CUGGUUCUAU | | GCTGGTTCTATTTAATGGACA | | |
| FURIN_ | UGAGAUAAUG | 2480 | TCTATTTAATGGACATGAGATAAT | 2504 | human |
| 4190 | UUAGAGGUUU | | GTTAGAGGTTTTAAAGTGATT | | |
| FURIN_ | GAGAUAAUGU | 2481 | CTATTTAATGGACATGAGATAATG | 2505 | human |
| 4191 | UAGAGGUUUU | | TTAGAGGTTTTAAAGTGATTA | | |
| FURIN_ | UUAGAGGUUU | 2482 | GGACATGAGATAATGTTAGAGGTT | 2506 | human |
| 4200 | UAAAGUGAUU | | TTAAAGTGATTAAACGTGCAG | | |

TABLE 12E
Host targets screened - IL-6R-20 nucleotide targets and 45 nucleotide
gene target regions

| Se- | | SEQ | | SEQ | |
|---|---|---|---|---|---|
| quence | | ID | | ID | |
| ID | Sequence | NO: | Gene Region | NO: | Species |
| IL6R_ | UGAGUCAUGUG | 2507 | GACCGTCCGCCGCTCTGAGTCAT | 2529 | human |
| 38 | CGAGUGGGA | | GTGCGAGTGGGAAGTCGCACTG | | |
| IL6R_ | AGAGCCGGAAG | 2508 | GACCTGCCCGGGGGTAGAGCCG | 2530 | human |
| 437 | ACAAUGCCA | | GAAGACAATGCCACTGTTCACTG | | |
| IL6R_ | CUCAGCAAUGU | 2509 | TTCCGGAAGAGCCCCCTCAGCAA | 2531 | human |
| 666 | UGUUUGUGA | | TGTTGTTTGTGAGTGGGGTCCT | | |
| IL6R_ | GCUCUUGGUGA | 2510 | GACGACAAAGGCTGTGCTCTTGG | 2532 | human |
| 728 | GGAAGUUUC | | TGAGGAAGTTTCAGAACAGTCC | | |
| IL6R_ | AGUGUCGGGAG | 2511 | ATGTGCGTCGCCAGTAGTGTCGG | 2533 | human |
| 876 | CAAGUUCAG | | GAGCAAGTTCAGCAAAACTCAA | | |
| IL6R_ | UUCAGCAAAAC | 2512 | AGTGTCGGGAGCAAGTTCAGCA | 2534 | human |
| 891 | UCAAACCUU | | AAACTCAAACCTTTCAGGGTTGT | | |
| IL6R_ | UCAAACCUUUCA | 2513 | CAAGTTCAGCAAAACTCAAACCT | 2535 | human |
| 902 | GGGUUGUG | | TTCAGGGTTGTGGAATCTTGCA | | |
| IL6R_ | UUCAGGGUUGU | 2514 | GCAAAACTCAAACCTTTCAGGGT | 2536 | human |
| 910 | GGAAUCUUG | | TGTGGAATCTTGCAGCCTGATC | | |
| IL6R_ | CACUCCUGGAAC | 2515 | ACCTGGCAAGACCCCCACTCCTG | 2537 | human |
| 1011 | UCAUCUUU | | GAACTCATCTTTCTACAGACTA | | |
| IL6R_ | ACUCCUGGAACU | 2516 | CCTGGCAAGACCCCCACTCCTGG | 2538 | human |
| 1012 | CAUCUUUC | | AACTCATCTTTCTACAGACTAC | | |
| IL6R_ | GGUUUGAGCUC | 2517 | CTTTCTACAGACTACGGTTTGAG | 2539 | human |
| 1042 | AGAUAUCGG | | CTCAGATATCGGGCTGAACGGT | | |
| IL6R_ | UCAGAUAUCGG | 2518 | GACTACGGTTTGAGCTCAGATAT | 2540 | human |
| 1051 | GCUGAACGG | | CGGGCTGAACGGTCAAAGACAT | | |
| IL6R_ | CUGAACGGUCA | 2519 | AGCTCAGATATCGGGCTGAACG | 2541 | human |
| 1063 | AAGACAUUC | | GTCAAAGACATTCACAACATGGA | | |
| IL6R_ | AAAGACAUUCA | 2520 | TCGGGCTGAACGGTCAAAGACA | 2542 | human |
| 1073 | CAACAUGGA | | TTCACAACATGGATGGTCAAGGA | | |
| IL6R_ | UCCAGCAUCACU | 2521 | GGATGGTCAAGGACCTCCAGCA | 2543 | human |
| 1105 | GUGUCAUC | | TCACTGTGTCATCCACGACGCCT | | |
| IL6R_ | UUGGACAGAAG | 2522 | GGCCATGGGCACGCCTTGGACA | 2544 | human |
| 1229 | GUCUCCUGA | | GAAGGTCTCCTGAGAGGGTCACT | | |
| IL6R_ | CCUGAGAGGGU | 2523 | TTGGACAGAAGGTCTCCTGAGA | 2545 | human |
| 1244 | CACUGCAAA | | GGGTCACTGCAAAAGAGAATCTC | | |
| IL6R_ | CACUGCAAAAG | 2524 | GTCTCCTGAGAGGGTCACTGCAA | 2546 | human |
| 1255 | AGAAUCUCG | | AAGAGAATCTCGTTCCAACCTC | | |
| IL6R_ | UGCAAAAGAGA | 2525 | TCCTGAGAGGGTCACTGCAAAA | 2547 | human |
| 1258 | AUCUCGUUC | | GAGAATCTCGTTCCAACCTCCCT | | |
| IL6R_ | GUGGACCACGCC | 2526 | CCTGTCAATCTGAACGTGGACCA | 2548 | human |
| 1350 | UAAACUAA | | CGCCTAAACTAATTTTTGACTG | | |
| IL6R_ | UGGACCACGCCU | 2527 | CTGTCAATCTGAACGTGGACCAC | 2549 | human |
| 1351 | AAACUAAU | | GCCTAAACTAATTTTTGACTGC | | |
| IL6R_ | UGUGCCAGCUG | 2528 | CTAATTTTTGACTGCTGTGCCAG | 2550 | human |
| 1381 | GAGUGAUGA | | CTGGAGTGATGATAGGCTCACT | | |

[0600] Using a novel algorithm, a panel of siRNAs targeting various regions of ACE2 and FURIN mRNA were designed (FIG. 12). For ASOs, a second step of selection involved testing the secondary structure (accessibility) of the target using the online algorithm lncASO. The sequences of ASOs targeting ACE2 and FURIN are summarized in Table 13A and Table 131B, respectively.

TABLE 13A
ASOs targeting host factors-ACE2 target

| | | SEQ | homology | | |
|---|---|---|---|---|---|
| | Sequence | ID | | | Mon- |
| Oligo ID | (anti sense) | NO: | Human | Mouse | key |
| ACE2_171 | GCAAGTGAACTTTGAT | 2551 | Y | Y | Y |
| ACE2_250 | AAAGGCAGACCATTTG | 2552 | Y | Y | N |
| ACE2_567 | GGCCTCAGCTGCTTGC | 2553 | Y | Y | Y |
| ACE2_694 | GCCGCGGCTGTAGTCA | 2554 | Y | N | N |
| ACE2_702 | ATCAACTGGCCGCGGC | 2555 | Y | N | N |
| ACE2_851 | TACCCCACATATCACC | 2556 | Y | Y | Y |
| ACE2_938 | AGGCCTGGTCCACCAT | 2557 | Y | N | N |
| ACE2_1326 | TCTTCTTGAAAATCGG | 2558 | Y | Y | N |
| ACE2_1425 | AAGACCATCCACCTCC | 2559 | Y | Y | Y |
| ACE2_1533 | GGGTCACAGTATGTTT | 2560 | Y | Y | Y |
| ACE2_1666 | GATGTCACATTTGTGC | 2561 | Y | Y | Y |
| ACE2_2806 | GAGTTCACGGAGGCCC | 2562 | Y | N | N |

TABLE 13B
ASOs targeting host factors-FURIN target

| | | SEQ | homology | | |
|---|---|---|---|---|---|
| | Sequence | ID | | | Mon- |
| Oligo ID | (anti sense) | NO: | Human | Mouse | key |
| FURIN_176 | CCGGGGCTGACTGGTG | 2563 | Y | Y | Y |
| FURIN_450 | AAGATCTGGCCCAGGT | 2564 | Y | Y | N |
| FURIN_963 | GTCACCTCGCCATCCA | 2565 | Y | Y | Y |
| FURIN_1044 | TCATCCTCGGGGCCCC | 2566 | Y | N | Y |
| FURIN_1184 | CGCAGTTGCAGCTGTC | 2567 | Y | N | Y |
| FURIN_1229 | TGGCGCTGCTGATGGA | 2568 | Y | Y | Y |
| FURIN_1400 | TGATGCCGGCTGCTAA | 2569 | Y | N | Y |
| FURIN_1610 | GCTGGGGGGCCACTGT | 2570 | Y | Y | N |
| FURIN_2213 | CACATGAGGCGTGGCA | 2571 | Y | Y | Y |
| FURIN_2217 | GTGGCACATGAGGCGT | 2572 | Y | Y | Y |
| FURIN_2649 | AGGGCGCTCTGGTCTT | 2573 | Y | Y | Y |
| FURIN_2653 | TCAGAGGGCGCTCTGG | 2574 | Y | N | Y |

[0601] SiRNAs targeting ACE2 and FURIN, two endogenous genes necessary for viral entry and spread were tested for silencing efficacy. FIG. 13A-13B depict the identification of siRNA hits for ACE2 and FURIN, respectively. For each target, at least 3 siRNAs were identified that reduced target mRNA expression below 75% compared to untreated controls. siRNAs were tested in human Hacat cells and silencing was assessed using the QuantiGene assay and confirmed using psicheck reporter system. FIG. 14A-14B depict validation and determination of IC₅₀ values for siRNAs targeting ACE2 (FIG. 14A) and FURIN (FIG. 14B). SiRNAs targeting ACE2 and FURIN were tested for silencing efficacy in 8-point dose response studies. Each siRNA showed potent and efficacious target silencing with IC₅₀ values in the low nanomolar range. FIG. 15A-15D depict validation and determination of IC₅₀ values for four selected siRNAs, tested for silencing efficacy in 8-point dose response studies. Each siRNA showed potent and efficacious target silencing with IC₅₀ values in the low nanomolar range. siRNAs were tested in HaCat cells and silencing was assessed using QuantiGene.

[0602] The identification of ASO hits for ACE2 and FURIN are shown in FIG. 16. Twelve LNA gapmers targeting ACE2 (FIG. 16A) and FURIN (FIG. 16B), two endogenous genes necessary for viral entry and spread, were tested for silencing efficacy. For each target, at least 3 ASOs were identified that reduced target mRNA expression below 75% compared to untreated controls. ASOs were tested in human U2OS cells and silencing was assessed using QRT-PCR assay. FIG. 17A-17B depict the identification of ASO hits for ACE2 and FURIN. Twelve LNA gapmers targeting ACE2 (FIG. 17A) and FURIN (FIG. 17B), two endogenous genes necessary for viral entry and spread for silencing efficacy. For each target, we identified at least 3 ASOs that reduced target mRNA expression below 75% compared to untreated controls. ASOs were tested in human U2OS cells and silencing was assessed using QRT-PCR assay. Concentration: 1.5 μM; Time point: 72 hours. FIG. 18 depict validation and determination of IC₅₀ values for ASOs targeting ACE2 (FIG. 18A) and FURIN (FIG. 18B). ASOs targeting ACE2 and FURIN were tested for silencing efficacy in 3-point dose response and gene expression was measured using QRT-PCR. Concentration: Top=1.5 μM; Time point: 5 days.

### Example 3. Delivery to the Lungs

[0603] In the present invention, methodologies are disclosed for a uniform and efficient delivery of fully stabilized siRNAs to the lung. Lung delivery was achieved after intratracheal administration (IT). This route might have significant advantages when using siRNA cocktails for prophylaxis and in the field as it is minimally invasive. Efficient delivery is observed to several cell types, including endothelial, epithelial, fibroblasts and immune cells in the lungs. Hydrophobically modified siRNAs often induce strong immune responses after local delivery and thus can't be widely used. Surprisingly therapeutic distribution of Phosphorothioate enriched, fully modified siRNAs was observed after intratracheal administration. Delivery to relevant cell types was observed after administration of both monovalent and divalent compounds, with increased delivery after administration of divalent versus monovalent entities.

[0604] The presence of a two-thymidine linker between the conjugate and the siRNA does not impact siRNA tissue distribution profile (FIG. 19). Three different siRNA structural configurations were studied to evaluate the impact of the nature of the linker on distribution of DCA-conjugated siRNA in liver, kidney, spleen, lung, heart, muscle and fat 1-week after a single SC injection with 20 mg/kg (n=5-6 mice per group ±SD), as measured by a PNA hybridization assay. Data show efficient delivery of all three siRNA configurations to the lung.

[0605] The presence of a two-thymidine linker was found to increase DCA-conjugated siRNA silencing in multiple tissues, as measured by huntingtin and cyclophilin B mRNA expression (FIG. 20). Six mice per group were injected with siRNA by SC injection (FVB/N mice); 20 mg/kg; and tissues were collected one week after injection. The mRNA levels were measured using QuantiGene® (Affymetrix), and normalized to a housekeeping gene, Hprt (Hypoxanthine-guanine phosphoribosyl transferase), and presented as percent of PBS (Phosphate buffered saline) control (mean±SD).

[0606] Six siRNAs were then designed containing different numbers of 3′ exNA modifications and phosphorothioates. (FIG. 21) for lung delivery via systemic (SC) delivery. In FIG. 22 the impact of the chemical composition on siRNA distribution and efficacy is evaluated. The data show increased accumulation of DCA-conjugated siRNAs with exNA modifications compared to those without exNAs in all tissues including the lungs. Injections were done SC, 20 mg/kg, in three mice, for 1 week, and distributions were assessed in the PNA hybridization assay. Results show for the p2 scaffold show that 4PS-exNa accumulation was comparable to 7PS in liver, spleen, and lung; 4PS-exNa>7 PS in heart, muscle, fat; 7PS>4PS-exNa in kidney. p5 scaffold: 4PS-exNa>2PO-exNa 2PS-exNa≥4 PS>2 PS.

[0607] Increased silencing of DCA-conjugated siRNAs was achieved with exNA modifications compared to those without exNAs in all tissues including the lungs (FIG. 23). Target mRNA silencing (Htt) after systemic administration of siRNAs conjugated to DCA and containing different numbers of 3′ exNA modifications and phosphorothioates was assessed in various organ tissues including the liver, kidney, spleen, muscle, lung, heart, adrenal glands, and fat. The delivery was done by SC injection, 20 mg/kg, in five mice per group for one week, and quantification was done with the bDNA QuantiGene assay.

[0608] SiRNAs were then designed for lung delivery, to evaluate the impact of the chemical composition on siRNA distribution and efficacy (FIG. 24). The distribution and delivery throughout the lung of mono- and divalent siRNAs (Cy-3) is shown in FIG. 25A, and of DCA and EPA conjugated siRNAs (Cy-3) in FIG. 25B. Delivery via intratracheal injection (mono and divalent conjugates) were at 20 nmol for monovalent, and 40 nmol for divalent siRNAs, in two mice per group, and tissues were harvested after 24 h. Subcutaneous delivery (EPA and DCA conjugates) was at 40 nmol per construct in three mice per group and tissues were harvested after 48 h. Magnification is 5×, and the scale=1 mm.

[0609] Divalent siRNAs distribute to all cells of the lungs and saturate both alveolar and epithelial (club) cells 24 hours after intratracheal administration. Accumulation of mono and di-valent siRNA (Cy-3, red) after intratracheal administration is shown in FIG. 26. Distribution is shown throughout the lung (FIG. 26A), in club cells (FIG. 26B; green), and in alveoli type II cells (FIG. 26C; green) as compared to PBS controls. FIG. 27 depict results obtained with EPA and DCA conjugates delivered by subcutaneous (SC) administration as assessed after 48 h.

[0610] Divalent siRNAs showed the highest amount of uptake among mon-divalent, EPA-conjugated and DCA-conjugated siRNA's, both in alveolar cells as well as in club cells (FIG. 28A and FIG. 28C, respectively, as quantitated in FIG. 28B. and FIG. 28D, respectively). Quantitation was performed using cy3 fluorescence signal intensity and colocalization with markers of different cell types, siRNA accumulation was quantified after systemic (SC) administration of EPA and DCA conjugated siRNAs, and intratracheal administration of mono and di-valent siRNAs. All siRNAs delivered to cells throughout the lung but to different extents.

[0611] Monovalent, divalent, EPA-conjugated and DCA-conjugated siRNA 1 siRNAs delivered to cells throughout the lung, but to a different extent. Cy-3 signals were quantitated in total cells, immune cells, endothelial cells, epithelial cells and fibroblasts, after systemic (SC) administration of EPA and DCA conjugated siRNAs (FIG. 29A-29C) and after intratracheal (IT) administration of mono- and divalent siRNAs (FIG. 30A-30C).

[0612] There is a clear increased accumulation of di-siRNA compared mono siRNA or DCA- or EPA-conjugated siRNA in the lungs. The distribution and accumulation of mono and di-siRNAs in various tissues were assessed after intratracheal injection, and for DCA- and EPA-conjugated siRNA after SC injection, as shown in FIG. 31. Amounts injected by intratracheal administration were 7.5 and 15 nmol, for mono- and divalent siRNA, respectively, and 40 nmol for EPA/DCA conjugated siRNA, in groups of three mice each, followed by quantitation of siRNA accumulation after a week using the PNA hybridization assay.

[0613] A low dose of di-siRNA achieved the best silencing in lungs without silencing the gene in other tissues. FIG. 32A-32H and FIG. 33 show target mRNA silencing (Htt) after intratracheal administration of mono and di-siRNAs (7.5 or 15 nmol, respectively) in liver, kidney, spleen, lung, heart, adrenal glands; muscle and fat tissues, showing that divalent siRNA selectively silences the Htt mRNA in the lung.

### Example 4. Additional SARS-CoV-2 Target Sites

[0614] Materials and Methods for Example 4

[0615] siRNA Treatment and Infection Assay

[0616] siRNAs were complexed with Lipofectamine RNAiMAX (Invitrogen) according to the manufacturer's protocol and added to the wells of a 96-well plate at the desired final concentration (10 nM for screening, concentration range for dose response assays). To each of these wells was added A549 cells expressing the human ACE2 receptor at a final concentration of 15,000 cells/well. The plate was incubated for 36 hours at 37° C., 5% CO₂. After 36 hours of siRNA treatment, SARS CoV-2 virus was added to each well at a final MOI of 0.1 (unless otherwise specified) and incubated for 1 hour. One hour after virus addition, wells were washed with PBS and incubated for a further 48 hours followed by processing for molecular biology analysis.

[0617] Viral RNA Abundance

[0618] Viral RNA abundance was measured from the supernatants of cells 48 hours post virus infection. Briefly, 100 μL of cell culture supernatant from cells was treated with Trizol-LS according to the manufacturer's recommendations. RNA was then isolated using standard protocols using chloroform and ethanol. The abundance of SARS-CoV-2 Nucleocapsid RNA was measured by real-time quantitative PCR using the QuantiFast Pathogen RT-PCR kit (Qiagen) with the 2019-nCoV CDC qPCR Probe (IDT).

[0619] Viral Protein Abundance

[0620] Viral protein abundance was measured using immunofluorescence staining with anti-SARS-CoV-2 spike antibody to detect viral spike protein. Briefly, cells were fixed using 4% paraformaldehyde and serial ethanol dehydration followed by standard immunofixation procedures to detect proteins. Cells staining positive for the viral spike protein were counted using a fluorescence microscope.

[0621] Additional siRNAs and ASOs were tested against various SARS-CoV2 genes. siRNAs and ASOs were tested in A549-ACE2 cells and silencing was assessed using the psi-check reporter system. siRNA concentration: 10 nM; ASO concentration: 25 nM; Time point: 72 hours. As shown in FIG. 34, numerous siRNAs and ASOs were cabable of reducing SARS-CoV-2 mRNA levels by 99%, including several that reduce levels to a similar level as remdesivir, an approved therapy for COVD-19.

[0622] Based on the results of the screen performed in FIG. 34, several top hits were tested in dose response experiments. siRNAs 1a_2290, 7a_27751, 1ab_18571, and N_29293 were each tested at concentrations of 10 nM, 2 nM, 0.4 nM, and 0.08 nM. As shown in FIG. 35, each of the tested siRNAs were able to effectly silence SARS-CoV-2 mRNA at several doses. Moreover, the tested siRNAs led to reduction of SARS-CoV-2 spike protein positive cells.

[0623] An additional dose response experiment was performed as described above for FIG. 35. In this experiment, cells were infected with SARS-CoV-2 at a multiplicity of infection (MOI) of 0.1 and 0.4. As shown in FIG. 36, the tested siRNAs were able to effectly silence SARS-CoV-2 mRNA at several doses and at both MOIs tested.

[0624] An additional screen of siRNAs was performed targeting the orf7a SARS-CoV2 gene. siRNAs were tested in in A549-ACE2 cells and the data reported was relative mRNA abundance of the targeted orf7a SARS-CoV2 gene and the percent of cells that are positive for the SARS-CoV2 spike protein. siRNA concentration: 10 nM; Time point: 72 hours. As shown in FIG. 37, numerous siRNAs were identified that effectively target orf7a.

[0625] The antisense and sense strands of the siRNAs tested in FIGS. 35 and 36 are shown below in Table 14.

TABLE 14
Antisense and Sense sequences of select siRNAs.

| | Orf7a_27751 | SEQ ID NO: |
|---|---|---|
| Antisense | 5′ UGAAAGUUCAAUCAUUCUUUU 3′ | 2575 |
| Sense | 5′ AAUGAUUGAACUUUCA 3′ | 2576 |

N_29293

| | | |
|---|---|---|
| Antisense | 5′ UGAAAUUUGGAUCUUUGUUUU 3′ | 2577 |
| Sense | 5′ AAAGAUCCAAAUUUCA 3′ | 2578 |

Orf1a_2290

| | | |
|---|---|---|
| Antisense | 5′ UAAGCUUAAAGAAUGUCUUUU 3′ | 2579 |
| Sense | 5′ ACAUUCUUUAAGCUUA 3′ | 2580 |

Orf1ab_18571

| | | |
|---|---|---|
| Antisense | 5′ UCAAAUACGACUCUGUCUUUU 3′ | 2581 |
| Sense | 5′ ACAGAGUCGUAUUUGA 3′ | 2582 |

### INCORPORATION BY REFERENCE

[0626] The contents of all cited references (including literature references, patents, patent applications, and websites) that maybe cited throughout this application are hereby expressly incorporated by reference in their entirety for any purpose, as are the references cited therein. The disclosure will employ, unless otherwise indicated, conventional techniques of immunology, molecular biology and cell biology, which are well known in the art.

[0627] The present disclosure also incorporates by reference in their entirety techniques well known in the field of molecular biology and drug delivery. These techniques include, but are not limited to, techniques described in the following publications:

[0628] Atwell et al. J. Mol. Biol. 1997, 270: 26-35;

[0629] Ausubel et al. (eds.), CURRENT PROTOCOLS IN MOLECULAR BIOLOGY, John Wiley &Sons, NY (1993);

[0630] Ausubel, F. M. et al. eds., SHORT PROTOCOLS IN MOLECULAR BIOLOGY (4th Ed. 1999) John Wiley & Sons, NY. (ISBN 0-471-32938-X);

[0631] CONTROLLED DRUG BIOAVAILABILITY, DRUG PRODUCT DESIGN AND PERFORMANCE, Smolen and Ball (eds.), Wiley, New York (1984);

[0632] Giege, R. and Ducruix, A. Barrett, CRYSTALLIZATION OF NUCLEIC ACIDS AND PROTEINS, a Practical Approach, 2nd ea., pp. 20 1-16, Oxford University Press, New York, N.Y., (1999);

[0633] Goodson, in MEDICAL APPLICATIONS OF CONTROLLED RELEASE, vol. 2, pp. 115-138 (1984);

[0634] Hammerling, et al., in: MONOCLONAL ANTIBODIES AND T-CELL HYBRIDOMAS 563-681 (Elsevier, N.Y., 1981;

[0635] Harlow et al., ANTIBODIES: A LABORATORY MANUAL, (Cold Spring Harbor Laboratory Press, 2nd ed. 1988);

[0636] Kabat et al., SEQUENCES OF PROTEINS OF IMMUNOLOGICAL INTEREST (National Institutes of Health, Bethesda, Md. (1987) and (1991);

[0637] Kabat, E. A., et al. (1991) SEQUENCES OF PROTEINS OF IMMUNOLOGICAL INTEREST, Fifth Edition, U.S. Department of Health and Human Services, NIH Publication No. 91-3242;

[0638] Kontermann and Dubel eds., ANTIBODY ENGINEERING (2001) Springer-Verlag. New York. 790 pp. (ISBN 3-540-41354-5).

[0639] Kriegler, Gene Transfer and Expression, A Laboratory Manual, Stockton Press, NY (1990);

[0640] Lu and Weiner eds., CLONING AND EXPRESSION VECTORS FOR GENE FUNCTION ANALYSIS (2001) BioTechniques Press. Westborough, Mass. 298 pp. (ISBN 1-881299-21-X).

[0641] MEDICAL APPLICATIONS OF CONTROLLED RELEASE, Langer and Wise (eds.), CRC Pres., Boca Raton, Fla. (1974);

[0642] Old, R. W. & S. B. Primrose, PRINCIPLES OF GENE MANIPULATION: AN INTRODUCTION TO GENETIC ENGINEERING (3d Ed. 1985) Blackwell Scientific Publications, Boston. Studies in Microbiology; V.2:409 pp. (ISBN 0-632-01318-4).

[0643] Sambrook, J. et al. eds., MOLECULAR CLONING: A LABORATORY MANUAL (2d Ed. 1989) Cold Spring Harbor Laboratory Press, NY. Vols. 1-3. (ISBN 0-87969-309-6).

[0644] SUSTAINED AND CONTROLLED RELEASE DRUG DELIVERY SYSTEMS, J. R. Robinson, ed., Marcel Dekker, Inc., New York, 1978

[0645] Winnacker, E. L. FROM GENES TO CLONES: INTRODUCTION TO GENE TECHNOLOGY (1987) VCH Publishers, NY (translated by Horst Ibelgaufts). 634 pp. (ISBN 0-89573-614-4).

### EQUIVALENTS

[0646] The disclosure may be embodied in other specific forms without departing from the spirit or essential characteristics thereof. The foregoing embodiments are therefore to be considered in all respects illustrative rather than limiting of the disclosure. Scope of the disclosure is thus indicated by the appended claims rather than by the foregoing description, and all changes that come within the meaning and range of equivalency of the claims are therefore intended to be embraced herein.

1. An oligonucleotide compound comprising 15 to 35 bases in length, comprising a sequence substantially complementary to a SARS-CoV-2 nucleic acid sequence of SEQ ID NO: 1.

2. The oligonucleotide compound of claim 1, comprising:
a sequence substantially complementary to a SARS-CoV-2 nucleic acid sequence of any one of SEQ ID NOs: 2-10,
a sequence substantially complementary to a SARS-CoV-2 nucleic acid sequence of any one of the 45-nucleotide target gene regions in Table 6A;
a sequence substantially complementary to a SARS-CoV-2 nucleic acid sequence of any one of the 20-nucleotide targets in Table 6A;
complementarity to at least 10, 11, 12 or 13 contiguous nucleotides of the SARS-CoV-2 nucleic acid sequence of any one of SEQ ID NOs: 1-10;
comprising no more than 3 mismatches with the SARS-CoV-2 nucleic acid sequence of any one of SEQ ID NOs: 1-10; or
comprising full complementarity to the SARS-CoV-2 nucleic acid sequence of any one of SEQ ID NOs: 1-10.

3-7. (canceled)

8. An oligonucleotide compound comprising 15 to 35 bases in length, comprising a sequence substantially complementary to an Angiotensin I Converting Enzyme 2 (ACE2) nucleic acid sequence of any one of the 45-nucleotide target gene regions in Table 11D or Table 12C.

9. The oligonucleotide compound of claim 8, comprising a sequence substantially complementary to an ACE2 nucleic acid sequence of any one of the 45-nucleotide target gene regions of ACE2_119, ACE2_336, ACE2_349, ACE_1034, ACE_1775, ACE_784, ACE_908, and ACE_1071, as recited in Table 12C

10. An oligonucleotide compound comprising 15 to 35 bases in length, comprising a sequence substantially complementary to a FURIN nucleic acid sequence of any one of the 45-nucleotide target gene regions in Table 1 IC or Table 12D.

11. The oligonucleotide compound of claim 10, comprising a sequence substantially complementary to a FURIN nucleic acid sequence of any one of the 45-nucleotide target gene regions of FURIN_443, FURIN_1959, FURIN_2711, FURIN_2712, FURIN 3524, and FURIN 3526, as recited in Table 12D.

12. An oligonucleotide compound comprising 15 to 35 bases in length, comprising a sequence substantially complementary to an Interleukin 6 (IL-6) nucleic acid sequence of any one of the 45-nucleotide target gene regions in Table 11B or Table 12B.

13. An oligonucleotide compound comprising 15 to 35 bases in length, comprising a sequence substantially complementary to a Transmembrane Serine Protease 2 (TMPRSS2) nucleic acid sequence of any one of the 45-nucleotide target gene regions in Table 11A or Table 12A.

14. (canceled)

15. The oligonucleotide compound of claim 1, wherein the oligonucleotide compound comprises one or more modified nucleotide, optionally wherein:
the oligonucleotide compound comprises at least 80% chemically modified nucleotides or 100% chemically modified nucleotides; and/or
the one or more modified nucleotides each independently comprise a modification of a ribose group, a phosphate group, a nucleobase, or a combination thereof, optionally wherein:
each modification of the ribose group is independently selected from the group consisting of 2′-O-methyl, 2′-fluoro, 2′-deoxy, 2′-O-(2-methoxyethyl) (MOE), 2′-O-alkyl, 2′-O-alkoxy, 2′-O-alkylamino, 2′-NH₂, and a constrained nucleotide, optionally wherein the constrained nucleotide is selected from the group consisting of a locked nucleic acid (LNA), an ethyl-constrained nucleotide, a 2′-(S)-constrained ethyl (S-cEt) nucleotide, a constrained MOE, a 2′-O,4′-C-aminomethylene bridged nucleic acid (2′,4′-BNA^{NC}), an alpha-L-locked nucleic acid, a tricyclo-DNA, and any combination thereof;
each modification of the nucleobase group is independently selected from the group consisting of 2-thiouridine, 4-thiouridine, N⁶-methyladenosine, pseudouridine, 2,6-diaminopurine, inosine, thymidine, 5-methylcytosine, 5-substituted pyrimidine, isoguanine, isocytosine, and halogenated aromatic groups; and/or
each modification of the phosphate group is independently selected from the group consisting of a phosphorothioate, phosphonoacetate (PACE), thiophosphonoacetate (thioPACE), amide, triazole, phosphonate, and phosphotriester modification, optionally comprising 4-16 phosphorothioate modifications or 6-13 phosphorothioate modifications.

16-24. (canceled)

25. The oligonucleotide compound of claim 1, wherein the oligonucleotide compound comprises at least one modified internucleotide linkage of Formula I: [chemical structure]
wherein:
B is a base pairing moiety;
W is selected from the group consisting of O, OCH₂, OCH, CH₂, and CH;
X is selected from the group consisting of halo, hydroxy, and C₁₋₆ alkoxy;
Y is selected from the group consisting of O—, OH, OR, NH—, NH₂, S—, and SH;
Z is selected from the group consisting of O and CH₂;
R is a protecting group; and [symbol]
is an optional double bond.

26-27. (canceled)

28. The oligonucleotide compound of claim 1, wherein the oligonucleotide compound comprises an antisense oligonucleotide or a double stranded (ds) RNA, optionally wherein the dsRNA comprises an antisense strand and a sense strand, optionally wherein:
the antisense strand comprises about 15 nucleotides to 25 nucleotides in length, optionally 20 nucleotides in length, 21 nucleotides in length, or 22 nucleotides in length;
the sense strand comprises about 15 nucleotides to 25 nucleotides in length, optionally 15 nucleotides in length, 16 nucleotides in length, 18 nucleotides in length, or 20 nucleotides in length;
the dsRNA comprises a double-stranded region of 15 base pairs to 20 base pairs, optionally 15 base pairs, 16 base pairs, 18 base pairs, or 20 base pairs;
the dsRNA comprises a blunt-end;
the dsRNA comprises at least one single stranded nucleotide overhang;
the dsRNA comprises about a 2-nucleotide to 5-nucleotide single stranded nucleotide overhang;
the dsRNA comprises at least 70% 2′-O-methyl nucleotide modifications;
the antisense strand comprises at least 70% 2′-O-methyl nucleotide modifications or about 70% to 90% 2′-O-methyl nucleotide modifications;
the sense strand comprises at least 65% 2′-O-methyl nucleotide modifications or 100% 2′-O-methyl nucleotide modifications;
the sense strand comprises one or more nucleotide mismatches between the antisense strand and the sense strand, optionally wherein the one or more nucleotide mismatches are present at positions 2, 6, and 12 from the 5′ end of sense strand;
the antisense strand comprises a 5′ phosphate, a 5′-alkyl phosphonate, a 5′ alkylene phosphonate, or a 5′ alkenyl phosphonate;
the antisense strand comprises a 5′ vinyl phosphonate;
the nucleotides at positions 1 and 2 from the 5′ end of antisense strand are connected to adjacent ribonucleotides via phosphorothioate linkages; and/or
(A) the dsRNA comprises an antisense strand and a sense strand, each strand with a 5′ end and a 3′ end, wherein:
(1) the antisense strand comprises a sequence substantially complementary to a SARS-CoV-2 nucleic acid sequence of any one of the 45-nucleotide target gene regions in Table 6A;
(2) the antisense strand comprises alternating 2′-methoxy-ribonucleotides and 2′-fluoro-ribonucleotides;
(3) the nucleotides at positions 2 and 14 from the 5′ end of the antisense strand are not 2′-methoxy-ribonucleotides;
(4) the nucleotides at positions 1-2 to 1-7 from the 3′ end of the antisense strand are connected to each other via phosphorothioate internucleotide linkages;
(5) a portion of the antisense strand is complementary to a portion of the sense strand;
(6) the sense strand comprises alternating 2′-methoxy-ribonucleotides and 2′-fluoro-ribonucleotides; and
(7) the nucleotides at positions 1-2 from the 5′ end of the sense strand are connected to each other via phosphorothioate internucleotide linkages; or
(B) the dsRNA comprises an antisense strand and a sense strand, each strand with a 5′ end and a 3′ end, wherein:
(1) the antisense strand comprises a sequence substantially complementary to a SARS-CoV-2 nucleic acid sequence of any one of the 45-nucleotide target gene regions in Table 6A;
(2) the antisense strand comprises at least 70% 2′-O-methyl modifications;
(3) the nucleotides at positions 2, 6, 14, and 16 from the 5′ end of the antisense strand are not a 2′-methoxy-ribonucleotide;
(4) the nucleotides at positions 1-2 to 1-7 from the 3′ end of the antisense strand are connected to each other via phosphorothioate internucleotide linkages;
(5) a portion of the antisense strand is complementary to a portion of the sense strand;
(6) the sense strand comprises at least 70% 2′-O-methyl modifications;
(7) the nucleotides at positions 6, 7, 8 and 10 from the 5′ end of the sense strand are not a 2′-methoxy-ribonucleotide; and
(8) the nucleotides at positions 1-2 from the 5′ end of the sense strand are connected to each other via phosphorothioate internucleotide linkages.

29-51. (canceled)

52. The dsRNA of claim 28, wherein the antisense strand, the sense strand, or both the antisense and sense strand comprises 1 to 5 internucleotide linkages of Formula I, optionally wherein:
the 3′ end of the antisense strand comprises 1 to 5 internucleotide linkages of Formula I;
the 3′ end of the antisense strand comprises 4 consecutive internucleotide linkages of Formula I; or
the 3′ end of the antisense strand comprises 4 consecutive internucleotide linkages of Formula I.

53-55. (canceled)

56. The dsRNA of claim 28, wherein a functional moiety is linked to one or both of the 5′ end and 3′ end of the sense strand, optionally wherein:
the functional moiety is linked to one or both of the antisense strand and sense strand by a linker, optionally wherein the linker comprises a divalent or trivalent linker, optionally selected from the group consisting of: [chemical structure]
wherein n is 1, 2, 3, 4, or 5;
the linker comprises an ethylene glycol chain, an alkyl chain, a peptide, an RNA, a DNA, a phosphodiester, a phosphorothioate, a phosphoramidate, an amide, a carbamate, or a combination thereof;
the linker comprises a dTdT dinucleotide;
the functional moiety is linked to the 3′ end of the sense strand by a dTdT dinucleotide followed by the linker [chemical structure]
wherein n is 1; and/or
the trivalent linker further links a phosphodiester or phosphodiester derivative, optionally wherein the phosphodiester or phosphodiester derivative is selected from the group consisting of: [chemical structure]
wherein X is O, S or BH₃; and/or
the functional moiety comprises a hydrophobic moiety, optionally wherein:
the hydrophobic moiety is selected from the group consisting of fatty acids, steroids, secosteroids, lipids, gangliosides, nucleoside analogs, endocannabinoids, vitamins, and a mixture thereof, optionally wherein:
the steroid selected from the group consisting of cholesterol and Lithocholic acid (LCA):
the fatty acid selected from the group consisting of Eicosapentaenoic acid (EPA), Docosahexaenoic acid (DHA) and Docosanoic acid (DCA); or
the vitamin is selected from the group consisting of choline, vitamin A, vitamin E, retinoic acid, alpha-tocopheryl succinate, and derivatives or metabolites thereof.

57-72. (canceled)

73. A double stranded (ds) RNA, comprising an antisense strand and a sense strand, each strand with a 5′ end and a 3′ end, wherein:
(1) the antisense strand comprises a sequence substantially complementary to a SARS-CoV-2 nucleic acid sequence of any one of the 45-nucleotide target gene regions in Table 6A;
(2) the antisense strand comprises at least 70% 2′-O-methyl modifications;
(3) the nucleotides at positions 2, 6, 14, and 16 from the 5′ end of the antisense strand are not a 2′-methoxy-ribonucleotide;
(4) the nucleotides at positions 1-2 to 1-7 from the 3′ end of the antisense strand are connected to each other via phosphorothioate internucleotide linkages;
(5) a portion of the antisense strand is complementary to a portion of the sense strand;
(6) the sense strand comprises at least 70% 2′-O-methyl modifications;
(7) the nucleotides at positions 6, 7, 8 and 10 from the 5′ end of the sense strand are not a 2′-methoxy-ribonucleotide;
(8) the nucleotides at positions 1-2 from the 5′ end of the sense strand are connected to each other via phosphorothioate internucleotide linkages; and
(9) the antisense strand comprises at least one modified intersubunit linkages of Formula II: [chemical structure]
wherein:
B is a base pairing moiety;
W is O or O(CH₂)ₙ¹, wherein n¹ is 1 to 10;
X is selected from the group consisting of H, OH, OR¹, F, SH, SR, NR²₂ and C₁₋₆-alkoxy;
Y is selected from the group consisting of O—, OH, OR, OR², NH—, NH₂, NR²₂, BH₃, S—, R¹, and SH;
Z is O or O(CH₂)ₙ² wherein n² is 1 to 10;
R¹ is alkyl, allyl or aryl; and
R² is alkyl, allyl or aryl.

74. The dsRNA of claim 73, wherein:
the 3′ end of the antisense strand comprises four consecutive modified intersubunit linkages of Formula II;
the antisense strand comprises a 5′ vinyl phosphonate;
the antisense strand is 20 nucleotides in length, 21 nucleotides in length, or 22 nucleotides in length;
the sense strand is 15 nucleotides in length, 16 nucleotides in length, 18 nucleotides in length, or 20 nucleotides in length; and/or
a functional moiety is linked to the 3′ end of the sense strand by a linker, optionally wherein:
the functional moiety comprises Eicosapentaenoic acid (EPA) or Docosanoic acid (DCA);
the linker comprises a dTdT dinucleotide; and/or
the functional moiety is linked to the 3′ end of the sense strand by a dTdT dinucleotide followed by the linker [chemical structure]
wherein n is 1.

75-82. (canceled)

83. A combination comprising two or more oligonucleotide compounds of claim 1, wherein at least two oligonucleotides or dsRNA comprise complementarity to a different SARS-CoV-2 nucleic acid sequence, optionally comprising two, three, four, or five oligonucleotide compounds or dsRNA, each comprising complementarity to a different SARS-CoV-2 nucleic acid sequence.

84-85. (canceled)

86. The combination of claim 83, comprising a first oligonucleotide compound, a second oligonucleotide compound, and a third oligonucleotide compound, wherein:
i) the first oligonucleotide compound comprises a sequence substantially complementary to the 45-nucleotide target gene region orfla_416, as recited in Table 6A;
ii) the second oligonucleotide compound comprises a sequence substantially complementary to the 45-nucleotide target gene region orfla_9679, as recited in Table 6A; and
iii) the third oligonucleotide compound comprises a sequence substantially complementary to the 45-nucleotide target gene region orflab_21391, as recited in Table 6A; or
i) the first oligonucleotide compound comprises a sequence substantially complementary to the 45-nucleotide target gene region orfla_416, as recited in Table 6A;
ii) the second oligonucleotide compound comprises a sequence substantially complementary to the 45-nucleotide target gene region orfla_8744, as recited in Table 6A; and
iii) the third oligonucleotide compound comprises a sequence substantially complementary to the 45-nucleotide target gene region orflab_21391, as recited in Table 6A; or
i) the first oligonucleotide compound comprises a sequence substantially complementary to the 45-nucleotide target gene region orfla_9679, as recited in Table 6A;
ii) the second oligonucleotide compound comprises a sequence substantially complementary to the 45-nucleotide target gene region orfla_8744, as recited in Table 6A; and
iii) the third oligonucleotide compound comprises a sequence substantially complementary to the 45-nucleotide target gene region orflab_21391, as recited in Table 6A; or
i) the first oligonucleotide compound comprises a sequence substantially complementary to the 45-nucleotide target gene region orfla_416, as recited in Table 6A;
ii) the second oligonucleotide compound comprises a sequence substantially complementary to the 45-nucleotide target gene region orfla_9679, as recited in Table 6A; and
iii) the third oligonucleotide compound comprises a sequence substantially complementary to the 45-nucleotide target gene region 7a_27565, as recited in Table 6A; or
i) the first oligonucleotide compound comprises a sequence substantially complementary to the 45-nucleotide target gene region orfla_416, as recited in Table 6A;
ii) the second oligonucleotide compound comprises a sequence substantially complementary to the 45-nucleotide target gene region orflab_21391, as recited in Table 6A; and
iii) the third oligonucleotide compound comprises a sequence substantially complementary to the 45-nucleotide target gene region 7a_27565, as recited in Table 6A; or
i) the first oligonucleotide compound comprises a sequence substantially complementary to the 45-nucleotide target gene region orflab_21391, as recited in Table 6A;
ii) the second oligonucleotide compound comprises a sequence substantially complementary to the 45-nucleotide target gene region 7a_27656, as recited in Table 6A; and
iii) the third oligonucleotide compound comprises a sequence substantially complementary to the 45-nucleotide target gene region 7a_27751, as recited in Table 6A; or
i) the first oligonucleotide compound comprises a sequence substantially complementary to the 45-nucleotide target gene region orfla_416, as recited in Table 6A;
ii) the second oligonucleotide compound comprises a sequence substantially complementary to the 45-nucleotide target gene region S_23174, as recited in Table 6A; and
iii) the third oligonucleotide compound comprises a sequence substantially complementary to the 45-nucleotide target gene region E_26305, as recited in Table 6A; or
i) the first oligonucleotide compound comprises a sequence substantially complementary to the 45-nucleotide target gene region orfla_9679, as recited in Table 6A;
ii) the second oligonucleotide compound comprises a sequence substantially complementary to the 45-nucleotide target gene region S_23174, as recited in Table 6A; and
iii) the third oligonucleotide compound comprises a sequence substantially complementary to the 45-nucleotide target gene region N_29293, as recited in Table 6A; or
i) the first oligonucleotide compound comprises a sequence substantially complementary to the 45-nucleotide target gene region orflab_21391, as recited in Table 6A;
ii) the second oligonucleotide compound comprises a sequence substantially complementary to the 45-nucleotide target gene region E_26305, as recited in Table 6A; and
iii) the third oligonucleotide compound comprises a sequence substantially complementary to the 45-nucleotide target gene region N_29293, as recited in Table 6A; or
i) the first oligonucleotide compound comprises a sequence substantially complementary to the 45-nucleotide target gene region S_23174, as recited in Table 6A;
ii) the second oligonucleotide compound comprises a sequence substantially complementary to the 45-nucleotide target gene region E_26470, as recited in Table 6A; and
iii) the third oligonucleotide compound comprises a sequence substantially complementary to the 45-nucleotide target gene region 7a_27565, as recited in Table 6A; or
i) the first oligonucleotide compound comprises a sequence substantially complementary to the 45-nucleotide target gene region S_23174, as recited in Table 6A;
ii) the second oligonucleotide compound comprises a sequence substantially complementary to the 45-nucleotide target gene region M_27123, as recited in Table 6A; and
iii) the third oligonucleotide compound comprises a sequence substantially complementary to the 45-nucleotide target gene region 7a_27656, as recited in Table 6A; or
i) the first oligonucleotide compound comprises a sequence substantially complementary to the 45-nucleotide target gene region S_23174, as recited in Table 6A;
ii) the second oligonucleotide compound comprises a sequence substantially complementary to the 45-nucleotide target gene region M_27032, as recited in Table 6A; and
iii) the third oligonucleotide compound comprises a sequence substantially complementary to the 45-nucleotide target gene region 7a_27751, as recited in Table 6A; or
i) the first oligonucleotide compound comprises a sequence substantially complementary to the 45-nucleotide target gene region orfla_416, as recited in Table 6A;
ii) the second oligonucleotide compound comprises a sequence substantially complementary to the 45-nucleotide target gene region E_26305, as recited in Table 6A; and
iii) the third oligonucleotide compound comprises a sequence substantially complementary to the 45-nucleotide target gene region 7a_27565, as recited in Table 6A; or
i) the first oligonucleotide compound comprises a sequence substantially complementary to the 45-nucleotide target gene region orfla_9679, as recited in Table 6A;
ii) the second oligonucleotide compound comprises a sequence substantially complementary to the 45-nucleotide target gene region E_26369, as recited in Table 6A; and
iii) the third oligonucleotide compound comprises a sequence substantially complementary to the 45-nucleotide target gene region 7a_27656, as recited in Table 6A;
i) the first oligonucleotide compound comprises a sequence substantially complementary to the 45-nucleotide target gene region orflab_21391, as recited in Table 6A;
ii) the second oligonucleotide compound comprises a sequence substantially complementary to the 45-nucleotide target gene region M_27032, as recited in Table 6A; and
iii) the third oligonucleotide compound comprises a sequence substantially complementary to the 45-nucleotide target gene region 7a_27751, as recited in Table 6A; or
i) the first oligonucleotide compound comprises a sequence substantially complementary to the 45-nucleotide target gene region 3a_25868, as recited in Table 6A;
ii) the second oligonucleotide compound comprises a sequence substantially complementary to the 45-nucleotide target gene region 7a_27751, as recited in Table 6A; and
iii) the third oligonucleotide compound comprises a sequence substantially complementary to the 45-nucleotide target gene region S_23774, as recited in Table 6A.

87. A combination comprising one or more oligonucleotide compounds for inhibiting the expression of a SARS-CoV-2 gene and one or more oligonucleotide compounds for inhibiting the expression of one or more of an ACE2 gene, a FURIN gene, an IL-6 gene, a TMPRSS2 gene, and a IL-6R gene.

88. A pharmaceutical composition for inhibiting the expression of one or more of a SARS-CoV-2 gene, an ACE2 gene, a FURIN gene, an IL-6 gene, a TMPRSS2 gene, and a IL-6R gene in a cell of an organism, comprising the oligonucleotide compound of claim 1 and a pharmaceutically acceptable carrier, optionally wherein the oligonucleotide compound inhibits the expression of one or more of the SARS-CoV-2 genes, the ACE2 gene, the FURIN gene, the IL-6 gene, the TMPRSS2 gene, and the IL-6R gene by at least 50% or by at least 75%.

89-94. (canceled)

95. A method for inhibiting expression of one or more of a SARS-CoV-2 gene, an ACE2 gene, a FURIN gene, an IL-6 gene, a TMPRSS2 gene, and an IL-6R gene in a cell, the method comprising:
(a) introducing into the cell an oligonucleotide compound of claim 1; and
(b) maintaining the cell produced in step (a) for a time sufficient to obtain degradation of the mRNA transcript of the SARS-CoV-2 gene, the ACE2 gene, the FURIN gene, the IL-6 gene, the TMPRSS2 gene, and the IL-6R gene thereby inhibiting expression of the SARS-CoV-2 gene, the ACE2 gene, the FURIN gene, the IL-6 gene, the TMPRSS2 gene, and the IL-6R gene in the cell.

96. A method of treating or managing a SARS-CoV-2 infection, comprising administering to a patient in need of such treatment a therapeutically effective amount of the oligonucleotide compound of claim 1, optionally wherein:
the oligonucleotide compound is administered by intratracheal (IT) injection, intravenous (IV) injection, subcutaneous (SQ) injection, or a combination thereof;
the oligonucleotide compound is administered sequentially or simultaneously;
administering the oligonucleotide compound causes a decrease in one or more of SARS-CoV-2 gene mRNA, ACE2 gene mRNA, FURIN gene mRNA, IL-6 gene mRNA, TMPRSS2 gene mRNA, and IL-6R gene mRNA in the lung; and/or
the oligonucleotide compound inhibits the expression of one or more of the SARS-CoV-2 gene, the ACE2 gene, the FURIN gene, the IL-6 gene, the TMPRSS2 gene, and the IL-6R gene by at least 50% or at least 75%.

97-101. (canceled)

102. A vector comprising a regulatory sequence operably linked to a nucleotide sequence that encodes an oligonucleotide compound of claim 1, optionally wherein the oligonucleotide compound inhibits the expression of one or more of the SARS-CoV-2 gene, the ACE2 gene, the FURIN gene, the IL-6 gene, the TMPRSS2 gene, and the IL-6R gene by at least 30%, at least 50%, or at least 75%.

103-105. (canceled)

106. A cell comprising the vector of claim 102.

107. A recombinant adeno-associated virus (rAAV) comprising the vector of claim 102 and an AAV capsid.

108. A branched oligonucleotide compound comprising two or more of the oligonucleotide compounds or dsRNA of claim 1 covalently bound to one another, optionally wherein the oligonucleotide compounds are covalently bound to one another by way of a linker, spacer, branching point, or a combination thereof.

109. (canceled)

110. A method of treating or managing a SARS-CoV-2 infection, comprising administering to a patient in need of such treatment a therapeutically effective amount of the branched oligonucleotide compound of claim 108, optionally wherein:
the branched oligonucleotide compound is administered by intratracheal (IT) injection, intravenous (IV) injection, subcutaneous (SQ) injection, or a combination thereof; and or
the branched oligonucleotide compound accumulates in lung tissue to a greater extent than a non-branched oligonucleotide compound when administered by intratracheal (IT) injection.

111-112. (canceled)

113. A branched RNA compound comprising:
two or more RNA molecules each comprising 15 to 35 nucleotides in length, and
a sequence substantially complementary to a SARS-CoV-2 nucleic acid sequence,
wherein the two or more RNA molecules are connected to one another by one or more moieties independently selected from a linker, a spacer, a branching point, and a combination thereof.

114. The branched RNA compound of claim 113, comprising a sequence substantially complementary to a SARS-CoV-2 nucleic acid sequence of any one of the 45-nucleotide target gene regions in Table 6A, optionally wherein:
each RNA molecule comprises 15 to 25 nucleotides in length;
each RNA molecule comprises a dsRNA comprising a sense strand and an antisense strand, wherein each antisense strand independently comprises a sequence substantially complementary to a SARS-CoV-2 nucleic acid sequence of any one of the 45-nucleotide target gene regions in Table 6A, optionally wherein the antisense strand comprises a portion having the nucleic acid sequence of any one of the antisense strands recited in Table 6B;
each RNA molecule comprises complementarity to at least 10, 11, 12 or 13 contiguous nucleotides of a SARS-CoV-2 nucleic acid sequence of any one of the 45-nucleotide target gene regions in Table 6A;
each RNA molecule comprises no more than 3 mismatches with a SARS-CoV-2 nucleic acid sequence of any one of the 45-nucleotide target gene regions in Table 6A; and/or
each RNA molecule comprises full complementary to a SARS-CoV-2 nucleic acid sequence of any one of the 45-nucleotide target gene regions in Table 6A.

115-198. (canceled)

199. A method of delivering an oligonucleotide compound to the lung of a patient, comprising administering the oligonucleotide compound, wherein the oligonucleotide compound is conjugated to a functional moiety selected from Eicosapentaenoic acid (EPA) and Docosanoic acid (DCA).

200-207. (canceled)

The application's sequence listing, which the Patent Office published only in electronic form, follows.

SEQUENCE LISTING (2596 sequences)

SEQ ID NO: 1 - DNA, 29903 bp, Severe acute respiratory syndrome coronavirus 2
attaaaggtttataccttcccaggtaacaaaccaaccaactttcgatctcttgtagatctgttctctaaacgaactttaaaatctgtgtggctgtcactcggctgcatgcttagtgcactcacgcagtataattaataactaattactgtcgttgacaggacacgagtaactcgtctatcttctgcaggctgcttacggtttcgtccgtgttgcagccgatcatcagcacatctaggtttcgtccgggtgtgaccgaaaggtaagatggagagccttgtccctggtttcaacgagaaaacacacgtccaactcagtttgcctgttttacaggttcgcgacgtgctcgtacgtggctttggagactccgtggaggaggtcttatcagaggcacgtcaacatcttaaagatggcacttgtggcttagtagaagttgaaaaaggcgttttgcctcaacttgaacagccctatgtgttcatcaaacgttcggatgctcgaactgcacctcatggtcatgttatggttgagctggtagcagaactcgaaggcattcagtacggtcgtagtggtgagacacttggtgtccttgtccctcatgtgggcgaaataccagtggcttaccgcaaggttcttcttcgtaagaacggtaataaaggagctggtggccatagttacggcgccgatctaaagtcatttgacttaggcgacgagcttggcactgatccttatgaagattttcaagaaaactggaacactaaacatagcagtggtgttacccgtgaactcatgcgtgagcttaacggaggggcatacactcgctatgtcgataacaacttctgtggccctgatggctaccctcttgagtgcattaaagaccttctagcacgtgctggtaaagcttcatgcactttgtccgaacaactggactttattgacactaagaggggtgtatactgctgccgtgaacatgagcatgaaattgcttggtacacggaacgttctgaaaagagctatgaattgcagacaccttttgaaattaaattggcaaagaaatttgacaccttcaatggggaatgtccaaattttgtatttcccttaaattccataatcaagactattcaaccaagggttgaaaagaaaaagcttgatggctttatgggtagaattcgatctgtctatccagttgcgtcaccaaatgaatgcaaccaaatgtgcctttcaactctcatgaagtgtgatcattgtggtgaaacttcatggcagacgggcgattttgttaaagccacttgcgaattttgtggcactgagaatttgactaaagaaggtgccactacttgtggttacttaccccaaaatgctgttgttaaaatttattgtccagcatgtcacaattcagaagtaggacctgagcatagtcttgccgaataccataatgaatctggcttgaaaaccattcttcgtaagggtggtcgcactattgcctttggaggctgtgtgttctcttatgttggttgccataacaagtgtgcctattgggttccacgtgctagcgctaacataggttgtaaccatacaggtgttgttggagaaggttccgaaggtcttaatgacaaccttcttgaaatactccaaaaagagaaagtcaacatcaatattgttggtgactttaaacttaatgaagagatcgccattattttggcatctttttctgcttccacaagtgcttttgtggaaactgtgaaaggtttggattataaagcattcaaacaaattgttgaatcctgtggtaattttaaagttacaaaaggaaaagctaaaaaaggtgcctggaatattggtgaacagaaatcaatactgagtcctctttatgcatttgcatcagaggctgctcgtgttgtacgatcaattttctcccgcactcttgaaactgctcaaaattctgtgcgtgttttacagaaggccgctataacaatactagatggaatttcacagtattcactgagactcattgatgctatgatgttcacatctgatttggctactaacaatctagttgtaatggcctacattacaggtggtgttgttcagttgacttcgcagtggctaactaacatctttggcactgtttatgaaaaactcaaacccgtccttgattggcttgaagagaagtttaaggaaggtgtagagtttcttagagacggttgggaaattgttaaatttatctcaacctgtgcttgtgaaattgtcggtggacaaattgtcacctgtgcaaaggaaattaaggagagtgttcagacattctttaagcttgtaaataaatttttggctttgtgtgctgactctatcattattggtggagctaaacttaaagccttgaatttaggtgaaacatttgtcacgcactcaaagggattgtacagaaagtgtgttaaatccagagaagaaactggcctactcatgcctctaaaagccccaaaagaaattatcttcttagagggagaaacacttcccacagaagtgttaacagaggaagttgtcttgaaaactggtgatttacaaccattagaacaacctactagtgaagctgttgaagctccattggttggtacaccagtttgtattaacgggcttatgttgctcgaaatcaaagacacagaaaagtactgtgcccttgcacctaatatgatggtaacaaacaataccttcacactcaaaggcggtgcaccaacaaaggttacttttggtgatgacactgtgatagaagtgcaaggttacaagagtgtgaatatcacttttgaacttgatgaaaggattgataaagtacttaatgagaagtgctctgcctatacagttgaactcggtacagaagtaaatgagttcgcctgtgttgtggcagatgctgtcataaaaactttgcaaccagtatctgaattacttacaccactgggcattgatttagatgagtggagtatggctacatactacttatttgatgagtctggtgagtttaaattggcttcacatatgtattgttctttctaccctccagatgaggatgaagaagaaggtgattgtgaagaagaagagtttgagccatcaactcaatatgagtatggtactgaagatgattaccaaggtaaacctttggaatttggtgccacttctgctgctcttcaacctgaagaagagcaagaagaagattggttagatgatgatagtcaacaaactgttggtcaacaagacggcagtgaggacaatcagacaactactattcaaacaattgttgaggttcaacctcaattagagatggaacttacaccagttgttcagactattgaagtgaatagttttagtggttatttaaaacttactgacaatgtatacattaaaaatgcagacattgtggaagaagctaaaaaggtaaaaccaacagtggttgttaatgcagccaatgtttaccttaaacatggaggaggtgttgcaggagccttaaataaggctactaacaatgccatgcaagttgaatctgatgattacatagctactaatggaccacttaaagtgggtggtagttgtgttttaagcggacacaatcttgctaaacactgtcttcatgttgtcggcccaaatgttaacaaaggtgaagacattcaacttcttaagagtgcttatgaaaattttaatcagcacgaagttctacttgcaccattattatcagctggtatttttggtgctgaccctatacattctttaagagtttgtgtagatactgttcgcacaaatgtctacttagctgtctttgataaaaatctctatgacaaacttgtttcaagctttttggaaatgaagagtgaaaagcaagttgaacaaaagatcgctgagattcctaaagaggaagttaagccatttataactgaaagtaaaccttcagttgaacagagaaaacaagatgataagaaaatcaaagcttgtgttgaagaagttacaacaactctggaagaaactaagttcctcacagaaaacttgttactttatattgacattaatggcaatcttcatccagattctgccactcttgttagtgacattgacatcactttcttaaagaaagatgctccatatatagtgggtgatgttgttcaagagggtgttttaactgctgtggttatacctactaaaaaggctggtggcactactgaaatgctagcgaaagctttgagaaaagtgccaacagacaattatataaccacttacccgggtcagggtttaaatggttacactgtagaggaggcaaagacagtgcttaaaaagtgtaaaagtgccttttacattctaccatctattatctctaatgagaagcaagaaattcttggaactgtttcttggaatttgcgagaaatgcttgcacatgcagaagaaacacgcaaattaatgcctgtctgtgtggaaactaaagccatagtttcaactatacagcgtaaatataagggtattaaaatacaagagggtgtggttgattatggtgctagattttacttttacaccagtaaaacaactgtagcgtcacttatcaacacacttaacgatctaaatgaaactcttgttacaatgccacttggctatgtaacacatggcttaaatttggaagaagctgctcggtatatgagatctctcaaagtgccagctacagtttctgtttcttcacctgatgctgttacagcgtataatggttatcttacttcttcttctaaaacacctgaagaacattttattgaaaccatctcacttgctggttcctataaagattggtcctattctggacaatctacacaactaggtatagaatttcttaagagaggtgataaaagtgtatattacactagtaatcctaccacattccacctagatggtgaagttatcacctttgacaatcttaagacacttctttctttgagagaagtgaggactattaaggtgtttacaacagtagacaacattaacctccacacgcaagttgtggacatgtcaatgacatatggacaacagtttggtccaacttatttggatggagctgatgttactaaaataaaacctcataattcacatgaaggtaaaacattttatgttttacctaatgatgacactctacgtgttgaggcttttgagtactaccacacaactgatcctagttttctgggtaggtacatgtcagcattaaatcacactaaaaagtggaaatacccacaagttaatggtttaacttctattaaatgggcagataacaactgttatcttgccactgcattgttaacactccaacaaatagagttgaagtttaatccacctgctctacaagatgcttattacagagcaagggctggtgaagctgctaacttttgtgcacttatcttagcctactgtaataagacagtaggtgagttaggtgatgttagagaaacaatgagttacttgtttcaacatgccaatttagattcttgcaaaagagtcttgaacgtggtgtgtaaaacttgtggacaacagcagacaacccttaagggtgtagaagctgttatgtacatgggcacactttcttatgaacaatttaagaaaggtgttcagataccttgtacgtgtggtaaacaagctacaaaatatctagtacaacaggagtcaccttttgttatgatgtcagcaccacctgctcagtatgaacttaagcatggtacatttacttgtgctagtgagtacactggtaattaccagtgtggtcactataaacatataacttctaaagaaactttgtattgcatagacggtgctttacttacaaagtcctcagaatacaaaggtcctattacggatgttttctacaaagaaaacagttacacaacaaccataaaaccagttacttataaattggatggtgttgtttgtacagaaattgaccctaagttggacaattattataagaaagacaattcttatttcacagagcaaccaattgatcttgtaccaaaccaaccatatccaaacgcaagcttcgataattttaagtttgtatgtgataatatcaaatttgctgatgatttaaaccagttaactggttataagaaacctgcttcaagagagcttaaagttacatttttccctgacttaaatggtgatgtggtggctattgattataaacactacacaccctcttttaagaaaggagctaaattgttacataaacctattgtttggcatgttaacaatgcaactaataaagccacgtataaaccaaatacctggtgtatacgttgtctttggagcacaaaaccagttgaaacatcaaattcgtttgatgtactgaagtcagaggacgcgcagggaatggataatcttgcctgcgaagatctaaaaccagtctctgaagaagtagtggaaaatcctaccatacagaaagacgttcttgagtgtaatgtgaaaactaccgaagttgtaggagacattatacttaaaccagcaaataatagtttaaaaattacagaagaggttggccacacagatctaatggctgcttatgtagacaattctagtcttactattaagaaacctaatgaattatctagagtattaggtttgaaaacccttgctactcatggtttagctgctgttaatagtgtcccttgggatactatagctaattatgctaagccttttcttaacaaagttgttagtacaactactaacatagttacacggtgtttaaaccgtgtttgtactaattatatgccttatttctttactttattgctacaattgtgtacttttactagaagtacaaattctagaattaaagcatctatgccgactactatagcaaagaatactgttaagagtgtcggtaaattttgtctagaggcttcatttaattatttgaagtcacctaatttttctaaactgataaatattataatttggtttttactattaagtgtttgcctaggttctttaatctactcaaccgctgctttaggtgttttaatgtctaatttaggcatgccttcttactgtactggttacagagaaggctatttgaactctactaatgtcactattgcaacctactgtactggttctataccttgtagtgtttgtcttagtggtttagattctttagacacctatccttctttagaaactatacaaattaccatttcatcttttaaatgggatttaactgcttttggcttagttgcagagtggtttttggcatatattcttttcactaggtttttctatgtacttggattggctgcaatcatgcaattgtttttcagctattttgcagtacattttattagtaattcttggcttatgtggttaataattaatcttgtacaaatggccccgatttcagctatggttagaatgtacatcttctttgcatcattttattatgtatggaaaagttatgtgcatgttgtagacggttgtaattcatcaacttgtatgatgtgttacaaacgtaatagagcaacaagagtcgaatgtacaactattgttaatggtgttagaaggtccttttatgtctatgctaatggaggtaaaggcttttgcaaactacacaattggaattgtgttaattgtgatacattctgtgctggtagtacatttattagtgatgaagttgcgagagacttgtcactacagtttaaaagaccaataaatcctactgaccagtcttcttacatcgttgatagtgttacagtgaagaatggttccatccatctttactttgataaagctggtcaaaagacttatgaaagacattctctctctcattttgttaacttagacaacctgagagctaataacactaaaggttcattgcctattaatgttatagtttttgatggtaaatcaaaatgtgaagaatcatctgcaaaatcagcgtctgtttactacagtcagcttatgtgtcaacctatactgttactagatcaggcattagtgtctgatgttggtgatagtgcggaagttgcagttaaaatgtttgatgcttacgttaatacgttttcatcaacttttaacgtaccaatggaaaaactcaaaacactagttgcaactgcagaagctgaacttgcaaagaatgtgtccttagacaatgtcttatctacttttatttcagcagctcggcaagggtttgttgattcagatgtagaaactaaagatgttgttgaatgtcttaaattgtcacatcaatctgacatagaagttactggcgatagttgtaataactatatgctcacctataacaaagttgaaaacatgacaccccgtgaccttggtgcttgtattgactgtagtgcgcgtcatattaatgcgcaggtagcaaaaagtcacaacattgctttgatatggaacgttaaagatttcatgtcattgtctgaacaactacgaaaacaaatacgtagtgctgctaaaaagaataacttaccttttaagttgacatgtgcaactactagacaagttgttaatgttgtaacaacaaagatagcacttaagggtggtaaaattgttaataattggttgaagcagttaattaaagttacacttgtgttcctttttgttgctgctattttctatttaataacacctgttcatgtcatgtctaaacatactgacttttcaagtgaaatcataggatacaaggctattgatggtggtgtcactcgtgacatagcatctacagatacttgttttgctaacaaacatgctgattttgacacatggtttagccagcgtggtggtagttatactaatgacaaagcttgcccattgattgctgcagtcataacaagagaagtgggttttgtcgtgcctggtttgcctggcacgatattacgcacaactaatggtgactttttgcatttcttacctagagtttttagtgcagttggtaacatctgttacacaccatcaaaacttatagagtacactgactttgcaacatcagcttgtgttttggctgctgaatgtacaatttttaaagatgcttctggtaagccagtaccatattgttatgataccaatgtactagaaggttctgttgcttatgaaagtttacgccctgacacacgttatgtgctcatggatggctctattattcaatttcctaacacctaccttgaaggttctgttagagtggtaacaacttttgattctgagtactgtaggcacggcacttgtgaaagatcagaagctggtgtttgtgtatctactagtggtagatgggtacttaacaatgattattacagatctttaccaggagttttctgtggtgtagatgctgtaaatttacttactaatatgtttacaccactaattcaacctattggtgctttggacatatcagcatctatagtagctggtggtattgtagctatcgtagtaacatgccttgcctactattttatgaggtttagaagagcttttggtgaatacagtcatgtagttgcctttaatactttactattccttatgtcattcactgtactctgtttaacaccagtttactcattcttacctggtgtttattctgttatttacttgtacttgacattttatcttactaatgatgtttcttttttagcacatattcagtggatggttatgttcacacctttagtacctttctggataacaattgcttatatcatttgtatttccacaaagcatttctattggttctttagtaattacctaaagagacgtgtagtctttaatggtgtttcctttagtacttttgaagaagctgcgctgtgcacctttttgttaaataaagaaatgtatctaaagttgcgtagtgatgtgctattacctcttacgcaatataatagatacttagctctttataataagtacaagtattttagtggagcaatggatacaactagctacagagaagctgcttgttgtcatctcgcaaaggctctcaatgacttcagtaactcaggttctgatgttctttaccaaccaccacaaacctctatcacctcagctgttttgcagagtggttttagaaaaatggcattcccatctggtaaagttgagggttgtatggtacaagtaacttgtggtacaactacacttaacggtctttggcttgatgacgtagtttactgtccaagacatgtgatctgcacctctgaagacatgcttaaccctaattatgaagatttactcattcgtaagtctaatcataatttcttggtacaggctggtaatgttcaactcagggttattggacattctatgcaaaattgtgtacttaagcttaaggttgatacagccaatcctaagacacctaagtataagtttgttcgcattcaaccaggacagactttttcagtgttagcttgttacaatggttcaccatctggtgtttaccaatgtgctatgaggcccaatttcactattaagggttcattccttaatggttcatgtggtagtgttggttttaacatagattatgactgtgtctctttttgttacatgcaccatatggaattaccaactggagttcatgctggcacagacttagaaggtaacttttatggaccttttgttgacaggcaaacagcacaagcagctggtacggacacaactattacagttaatgttttagcttggttgtacgctgctgttataaatggagacaggtggtttctcaatcgatttaccacaactcttaatgactttaaccttgtggctatgaagtacaattatgaacctctaacacaagaccatgttgacatactaggacctctttctgctcaaactggaattgccgttttagatatgtgtgcttcattaaaagaattactgcaaaatggtatgaatggacgtaccatattgggtagtgctttattagaagatgaatttacaccttttgatgttgttagacaatgctcaggtgttactttccaaagtgcagtgaaaagaacaatcaagggtacacaccactggttgttactcacaattttgacttcacttttagttttagtccagagtactcaatggtctttgttcttttttttgtatgaaaatgcctttttaccttttgctatgggtattattgctatgtctgcttttgcaatgatgtttgtcaaacataagcatgcatttctctgtttgtttttgttaccttctcttgccactgtagcttattttaatatggtctatatgcctgctagttgggtgatgcgtattatgacatggttggatatggttgatactagtttgtctggttttaagctaaaagactgtgttatgtatgcatcagctgtagtgttactaatccttatgacagcaagaactgtgtatgatgatggtgctaggagagtgtggacacttatgaatgtcttgacactcgtttataaagtttattatggtaatgctttagatcaagccatttccatgtgggctcttataatctctgttacttctaactactcaggtgtagttacaactgtcatgtttttggccagaggtattgtttttatgtgtgttgagtattgccctattttcttcataactggtaatacacttcagtgtataatgctagtttattgtttcttaggctatttttgtacttgttactttggcctcttttgtttactcaaccgctactttagactgactcttggtgtttatgattacttagtttctacacaggagtttagatatatgaattcacagggactactcccacccaagaatagcatagatgccttcaaactcaacattaaattgttgggtgttggtggcaaaccttgtatcaaagtagccactgtacagtctaaaatgtcagatgtaaagtgcacatcagtagtcttactctcagttttgcaacaactcagagtagaatcatcatctaaattgtgggctcaatgtgtccagttacacaatgacattctcttagctaaagatactactgaagcctttgaaaaaatggtttcactactttctgttttgctttccatgcagggtgctgtagacataaacaagctttgtgaagaaatgctggacaacagggcaaccttacaagctatagcctcagagtttagttcccttccatcatatgcagcttttgctactgctcaagaagcttatgagcaggctgttgctaatggtgattctgaagttgttcttaaaaagttgaagaagtctttgaatgtggctaaatctgaatttgaccgtgatgcagccatgcaacgtaagttggaaaagatggctgatcaagctatgacccaaatgtataaacaggctagatctgaggacaagagggcaaaagttactagtgctatgcagacaatgcttttcactatgcttagaaagttggataatgatgcactcaacaacattatcaacaatgcaagagatggttgtgttcccttgaacataatacctcttacaacagcagccaaactaatggttgtcataccagactataacacatataaaaatacgtgtgatggtacaacatttacttatgcatcagcattgtgggaaatccaacaggttgtagatgcagatagtaaaattgttcaacttagtgaaattagtatggacaattcacctaatttagcatggcctcttattgtaacagctttaagggccaattctgctgtcaaattacagaataatgagcttagtcctgttgcactacgacagatgtcttgtgctgccggtactacacaaactgcttgcactgatgacaatgcgttagcttactacaacacaacaaagggaggtaggtttgtacttgcactgttatccgatttacaggatttgaaatgggctagattccctaagagtgatggaactggtactatctatacagaactggaaccaccttgtaggtttgttacagacacacctaaaggtcctaaagtgaagtatttatactttattaaaggattaaacaacctaaatagaggtatggtacttggtagtttagctgccacagtacgtctacaagctggtaatgcaacagaagtgcctgccaattcaactgtattatctttctgtgcttttgctgtagatgctgctaaagcttacaaagattatctagctagtgggggacaaccaatcactaattgtgttaagatgttgtgtacacacactggtactggtcaggcaataacagttacaccggaagccaatatggatcaagaatcctttggtggtgcatcgtgttgtctgtactgccgttgccacatagatcatccaaatcctaaaggattttgtgacttaaaaggtaagtatgtacaaatacctacaacttgtgctaatgaccctgtgggttttacacttaaaaacacagtctgtaccgtctgcggtatgtggaaaggttatggctgtagttgtgatcaactccgcgaacccatgcttcagtcagctgatgcacaatcgtttttaaacgggtttgcggtgtaagtgcagcccgtcttacaccgtgcggcacaggcactagtactgatgtcgtatacagggcttttgacatctacaatgataaagtagctggttttgctaaattcctaaaaactaattgttgtcgcttccaagaaaaggacgaagatgacaatttaattgattcttactttgtagttaagagacacactttctctaactaccaacatgaagaaacaatttataatttacttaaggattgtccagctgttgctaaacatgacttctttaagtttagaatagacggtgacatggtaccacatatatcacgtcaacgtcttactaaatacacaatggcagacctcgtctatgctttaaggcattttgatgaaggtaattgtgacacattaaaagaaatacttgtcacatacaattgttgtgatgatgattatttcaataaaaaggactggtatgattttgtagaaaacccagatatattacgcgtatacgccaacttaggtgaacgtgtacgccaagctttgttaaaaacagtacaattctgtgatgccatgcgaaatgctggtattgttggtgtactgacattagataatcaagatctcaatggtaactggtatgatttcggtgatttcatacaaaccacgccaggtagtggagttcctgttgtagattcttattattcattgttaatgcctatattaaccttgaccagggctttaactgcagagtcacatgttgacactgacttaacaaagccttacattaagtgggatttgttaaaatatgacttcacggaagagaggttaaaactctttgaccgttattttaaatattgggatcagacataccacccaaattgtgttaactgtttggatgacagatgcattctgcattgtgcaaactttaatgttttattctctacagtgttcccacctacaagttttggaccactagtgagaaaaatatttgttgatggtgttccatttgtagtttcaactggataccacttcagagagctaggtgttgtacataatcaggatgtaaacttacatagctctagacttagttttaaggaattacttgtgtatgctgctgaccctgctatgcacgctgcttctggtaatctattactagataaacgcactacgtgcttttcagtagctgcacttactaacaatgttgcttttcaaactgtcaaacccggtaattttaacaaagacttctatgactttgctgtgtctaagggtttctttaaggaaggaagttctgttgaattaaaacacttcttctttgctcaggatggtaatgctgctatcagcgattatgactactatcgttataatctaccaacaatgtgtgatatcagacaactactatttgtagttgaagttgttgataagtactttgattgttacgatggtggctgtattaatgctaaccaagtcatcgtcaacaacctagacaaatcagctggttttccatttaataaatggggtaaggctagactttattatgattcaatgagttatgaggatcaagatgcacttttcgcatatacaaaacgtaatgtcatccctactataactcaaatgaatcttaagtatgccattagtgcaaagaatagagctcgcaccgtagctggtgtctctatctgtagtactatgaccaatagacagtttcatcaaaaattattgaaatcaatagccgccactagaggagctactgtagtaattggaacaagcaaattctatggtggttggcacaacatgttaaaaactgtttatagtgatgtagaaaaccctcaccttatgggttgggattatcctaaatgtgatagagccatgcctaacatgcttagaattatggcctcacttgttcttgctcgcaaacatacaacgtgttgtagcttgtcacaccgtttctatagattagctaatgagtgtgctcaagtattgagtgaaatggtcatgtgtggcggttcactatatgttaaaccaggtggaacctcatcaggagatgccacaactgcttatgctaatagtgtttttaacatttgtcaagctgtcacggccaatgttaatgcacttttatctactgatggtaacaaaattgccgataagtatgtccgcaatttacaacacagactttatgagtgtctctatagaaatagagatgttgacacagactttgtgaatgagttttacgcatatttgcgtaaacatttctcaatgatgatactctctgacgatgctgttgtgtgtttcaatagcacttatgcatctcaaggtctagtggctagcataaagaactttaagtcagttctttattatcaaaacaatgtttttatgtctgaagcaaaatgttggactgagactgaccttactaaaggacctcatgaattttgctctcaacatacaatgctagttaaacagggtgatgattatgtgtaccttccttacccagatccatcaagaatcctaggggccggctgttttgtagatgatatcgtaaaaacagatggtacacttatgattgaacggttcgtgtctttagctatagatgcttacccacttactaaacatcctaatcaggagtatgctgatgtctttcatttgtacttacaatacataagaaagctacatgatgagttaacaggacacatgttagacatgtattctgttatgcttactaatgataacacttcaaggtattgggaacctgagttttatgaggctatgtacacaccgcatacagtcttacaggctgttggggcttgtgttctttgcaattcacagacttcattaagatgtggtgcttgcatacgtagaccattcttatgttgtaaatgctgttacgaccatgtcatatcaacatcacataaattagtcttgtctgttaatccgtatgtttgcaatgctccaggttgtgatgtcacagatgtgactcaactttacttaggaggtatgagctattattgtaaatcacataaaccacccattagttttccattgtgtgctaatggacaagtttttggtttatataaaaatacatgtgttggtagcgataatgttactgactttaatgcaattgcaacatgtgactggacaaatgctggtgattacattttagctaacacctgtactgaaagactcaagctttttgcagcagaaacgctcaaagctactgaggagacatttaaactgtcttatggtattgctactgtacgtgaagtgctgtctgacagagaattacatctttcatgggaagttggtaaacctagaccaccacttaaccgaaattatgtctttactggttatcgtgtaactaaaaacagtaaagtacaaataggagagtacacctttgaaaaaggtgactatggtgatgctgttgtttaccgaggtacaacaacttacaaattaaatgttggtgattattttgtgctgacatcacatacagtaatgccattaagtgcacctacactagtgccacaagagcactatgttagaattactggcttatacccaacactcaatatctcagatgagttttctagcaatgttgcaaattatcaaaaggttggtatgcaaaagtattctacactccagggaccacctggtactggtaagagtcattttgctattggcctagctctctactacccttctgctcgcatagtgtatacagcttgctctcatgccgctgttgatgcactatgtgagaaggcattaaaatatttgcctatagataaatgtagtagaattatacctgcacgtgctcgtgtagagtgttttgataaattcaaagtgaattcaacattagaacagtatgtcttttgtactgtaaatgcattgcctgagacgacagcagatatagttgtctttgatgaaatttcaatggccacaaattatgatttgagtgttgtcaatgccagattacgtgctaagcactatgtgtacattggcgaccctgctcaattacctgcaccacgcacattgctaactaagggcacactagaaccagaatatttcaattcagtgtgtagacttatgaaaactataggtccagacatgttcctcggaacttgtcggcgttgtcctgctgaaattgttgacactgtgagtgctttggtttatgataataagcttaaagcacataaagacaaatcagctcaatgctttaaaatgttttataagggtgttatcacgcatgatgtttcatctgcaattaacaggccacaaataggcgtggtaagagaattccttacacgtaaccctgcttggagaaaagctgtctttatttcaccttataattcacagaatgctgtagcctcaaagattttgggactaccaactcaaactgttgattcatcacagggctcagaatatgactatgtcatattcactcaaaccactgaaacagctcactcttgtaatgtaaacagatttaatgttgctattaccagagcaaaagtaggcatactttgcataatgtctgatagagacctttatgacaagttgcaatttacaagtcttgaaattccacgtaggaatgtggcaactttacaagctgaaaatgtaacaggactctttaaagattgtagtaaggtaatcactgggttacatcctacacaggcacctacacacctcagtgttgacactaaattcaaaactgaaggtttatgtgttgacatacctggcatacctaaggacatgacctatagaagactcatctctatgatgggttttaaaatgaattatcaagttaatggttaccctaacatgtttatcacccgcgaagaagctataagacatgtacgtgcatggattggcttcgatgtcgaggggtgtcatgctactagagaagctgttggtaccaatttacctttacagctaggtttttctacaggtgttaacctagttgctgtacctacaggttatgttgatacacctaataatacagatttttccagagttagtgctaaaccaccgcctggagatcaatttaaacacctcataccacttatgtacaaaggacttccttggaatgtagtgcgtataaagattgtacaaatgttaagtgacacacttaaaaatctctctgacagagtcgtatttgtcttatgggcacatggctttgagttgacatctatgaagtattttgtgaaaataggacctgagcgcacctgttgtctatgtgatagacgtgccacatgcttttccactgcttcagacacttatgcctgttggcatcattctattggatttgattacgtctataatccgtttatgattgatgttcaacaatggggttttacaggtaacctacaaagcaaccatgatctgtattgtcaagtccatggtaatgcacatgtagctagttgtgatgcaatcatgactaggtgtctagctgtccacgagtgctttgttaagcgtgttgactggactattgaatatcctataattggtgatgaactgaagattaatgcggcttgtagaaaggttcaacacatggttgttaaagctgcattattagcagacaaattcccagttcttcacgacattggtaaccctaaagctattaagtgtgtacctcaagctgatgtagaatggaagttctatgatgcacagccttgtagtgacaaagcttataaaatagaagaattattctattcttatgccacacattctgacaaattcacagatggtgtatgcctattttggaattgcaatgtcgatagatatcctgctaattccattgtttgtagatttgacactagagtgctatctaaccttaacttgcctggttgtgatggtggcagtttgtatgtaaataaacatgcattccacacaccagcttttgataaaagtgcttttgttaatttaaaacaattaccatttttctattactctgacagtccatgtgagtctcatggaaaacaagtagtgtcagatatagattatgtaccactaaagtctgctacgtgtataacacgttgcaatttaggtggtgctgtctgtagacatcatgctaatgagtacagattgtatctcgatgcttataacatgatgatctcagctggctttagcttgtgggtttacaaacaatttgatacttataacctctggaacacttttacaagacttcagagtttagaaaatgtggcttttaatgttgtaaataagggacactttgatggacaacagggtgaagtaccagtttctatcattaataacactgtttacacaaaagttgatggtgttgatgtagaattgtttgaaaataaaacaacattacctgttaatgtagcatttgagctttgggctaagcgcaacattaaaccagtaccagaggtgaaaatactcaataatttgggtgtggacattgctgctaatactgtgatctgggactacaaaagagatgctccagcacatatatctactattggtgtttgttctatgactgacatagccaagaaaccaactgaaacgatttgtgcaccactcactgtcttttttgatggtagagttgatggtcaagtagacttatttagaaatgcccgtaatggtgttcttattacagaaggtagtgttaaaggtttacaaccatctgtaggtcccaaacaagctagtcttaatggagtcacattaattggagaagccgtaaaaacacagttcaattattataagaaagttgatggtgttgtccaacaattacctgaaacttactttactcagagtagaaatttacaagaatttaaacccaggagtcaaatggaaattgatttcttagaattagctatggatgaattcattgaacggtataaattagaaggctatgccttcgaacatatcgtttatggagattttagtcatagtcagttaggtggtttacatctactgattggactagctaaacgttttaaggaatcaccttttgaattagaagattttattcctatggacagtacagttaaaaactatttcataacagatgcgcaaacaggttcatctaagtgtgtgtgttctgttattgatttattacttgatgattttgttgaaataataaaatcccaagatttatctgtagtttctaaggttgtcaaagtgactattgactatacagaaatttcatttatgctttggtgtaaagatggccatgtagaaacattttacccaaaattacaatctagtcaagcgtggcaaccgggtgttgctatgcctaatctttacaaaatgcaaagaatgctattagaaaagtgtgaccttcaaaattatggtgatagtgcaacattacctaaaggcataatgatgaatgtcgcaaaatatactcaactgtgtcaatatttaaacacattaacattagctgtaccctataatatgagagttatacattttggtgctggttctgataaaggagttgcaccaggtacagctgttttaagacagtggttgcctacgggtacgctgcttgtcgattcagatcttaatgactttgtctctgatgcagattcaactttgattggtgattgtgcaactgtacatacagctaataaatgggatctcattattagtgatatgtacgaccctaagactaaaaatgttacaaaagaaaatgactctaaagagggttttttcacttacatttgtgggtttatacaacaaaagctagctcttggaggttccgtggctataaagataacagaacattcttggaatgctgatctttataagctcatgggacacttcgcatggtggacagcctttgttactaatgtgaatgcgtcatcatctgaagcatttttaattggatgtaattatcttggcaaaccacgcgaacaaatagatggttatgtcatgcatgcaaattacatattttggaggaatacaaatccaattcagttgtcttcctattctttatttgacatgagtaaatttccccttaaattaaggggtactgctgttatgtctttaaaagaaggtcaaatcaatgatatgattttatctcttcttagtaaaggtagacttataattagagaaaacaacagagttgttatttctagtgatgttcttgttaacaactaaacgaacaatgtttgtttttcttgttttattgccactagtctctagtcagtgtgttaatcttacaaccagaactcaattaccccctgcatacactaattctttcacacgtggtgtttattaccctgacaaagttttcagatcctcagttttacattcaactcaggacttgttcttacctttcttttccaatgttacttggttccatgctatacatgtctctgggaccaatggtactaagaggtttgataaccctgtcctaccatttaatgatggtgtttattttgcttccactgagaagtctaacataataagaggctggatttttggtactactttagattcgaagacccagtccctacttattgttaataacgctactaatgttgttattaaagtctgtgaatttcaattttgtaatgatccatttttgggtgtttattaccacaaaaacaacaaaagttggatggaaagtgagttcagagtttattctagtgcgaataattgcacttttgaatatgtctctcagccttttcttatggaccttgaaggaaaacagggtaatttcaaaaatcttagggaatttgtgtttaagaatattgatggttattttaaaatatattctaagcacacgcctattaatttagtgcgtgatctccctcagggtttttcggctttagaaccattggtagatttgccaataggtattaacatcactaggtttcaaactttacttgctttacatagaagttatttgactcctggtgattcttcttcaggttggacagctggtgctgcagcttattatgtgggttatcttcaacctaggacttttctattaaaatataatgaaaatggaaccattacagatgctgtagactgtgcacttgaccctctctcagaaacaaagtgtacgttgaaatccttcactgtagaaaaaggaatctatcaaacttctaactttagagtccaaccaacagaatctattgttagatttcctaatattacaaacttgtgcccttttggtgaagtttttaacgccaccagatttgcatctgtttatgcttggaacaggaagagaatcagcaactgtgttgctgattattctgtcctatataattccgcatcattttccacttttaagtgttatggagtgtctcctactaaattaaatgatctctgctttactaatgtctatgcagattcatttgtaattagaggtgatgaagtcagacaaatcgctccagggcaaactggaaagattgctgattataattataaattaccagatgattttacaggctgcgttatagcttggaattctaacaatcttgattctaaggttggtggtaattataattacctgtatagattgtttaggaagtctaatctcaaaccttttgagagagatatttcaactgaaatctatcaggccggtagcacaccttgtaatggtgttgaaggttttaattgttactttcctttacaatcatatggtttccaacccactaatggtgttggttaccaaccatacagagtagtagtactttcttttgaacttctacatgcaccagcaactgtttgtggacctaaaaagtctactaatttggttaaaaacaaatgtgtcaatttcaacttcaatggtttaacaggcacaggtgttcttactgagtctaacaaaaagtttctgcctttccaacaatttggcagagacattgctgacactactgatgctgtccgtgatccacagacacttgagattcttgacattacaccatgttcttttggtggtgtcagtgttataacaccaggaacaaatacttctaaccaggttgctgttctttatcaggatgttaactgcacagaagtccctgttgctattcatgcagatcaacttactcctacttggcgtgtttattctacaggttctaatgtttttcaaacacgtgcaggctgtttaataggggctgaacatgtcaacaactcatatgagtgtgacatacccattggtgcaggtatatgcgctagttatcagactcagactaattctcctcggcgggcacgtagtgtagctagtcaatccatcattgcctacactatgtcacttggtgcagaaaattcagttgcttactctaataactctattgccatacccacaaattttactattagtgttaccacagaaattctaccagtgtctatgaccaagacatcagtagattgtacaatgtacatttgtggtgattcaactgaatgcagcaatcttttgttgcaatatggcagtttttgtacacaattaaaccgtgctttaactggaatagctgttgaacaagacaaaaacacccaagaagtttttgcacaagtcaaacaaatttacaaaacaccaccaattaaagattttggtggttttaatttttcacaaatattaccagatccatcaaaaccaagcaagaggtcatttattgaagatctacttttcaacaaagtgacacttgcagatgctggcttcatcaaacaatatggtgattgccttggtgatattgctgctagagacctcatttgtgcacaaaagtttaacggccttactgttttgccacctttgctcacagatgaaatgattgctcaatacacttctgcactgttagcgggtacaatcacttctggttggacctttggtgcaggtgctgcattacaaataccatttgctatgcaaatggcttataggtttaatggtattggagttacacagaatgttctctatgagaaccaaaaattgattgccaaccaatttaatagtgctattggcaaaattcaagactcactttcttccacagcaagtgcacttggaaaacttcaagatgtggtcaaccaaaatgcacaagctttaaacacgcttgttaaacaacttagctccaattttggtgcaatttcaagtgttttaaatgatatcctttcacgtcttgacaaagttgaggctgaagtgcaaattgataggttgatcacaggcagacttcaaagtttgcagacatatgtgactcaacaattaattagagctgcagaaatcagagcttctgctaatcttgctgctactaaaatgtcagagtgtgtacttggacaatcaaaaagagttgatttttgtggaaagggctatcatcttatgtccttccctcagtcagcacctcatggtgtagtcttcttgcatgtgacttatgtccctgcacaagaaaagaacttcacaactgctcctgccatttgtcatgatggaaaagcacactttcctcgtgaaggtgtctttgtttcaaatggcacacactggtttgtaacacaaaggaatttttatgaaccacaaatcattactacagacaacacatttgtgtctggtaactgtgatgttgtaataggaattgtcaacaacacagtttatgatcctttgcaacctgaattagactcattcaaggaggagttagataaatattttaagaatcatacatcaccagatgttgatttaggtgacatctctggcattaatgcttcagttgtaaacattcaaaaagaaattgaccgcctcaatgaggttgccaagaatttaaatgaatctctcatcgatctccaagaacttggaaagtatgagcagtatataaaatggccatggtacatttggctaggttttatagctggcttgattgccatagtaatggtgacaattatgctttgctgtatgaccagttgctgtagttgtctcaagggctgttgttcttgtggatcctgctgcaaatttgatgaagacgactctgagccagtgctcaaaggagtcaaattacattacacataaacgaacttatggatttgtttatgagaatcttcacaattggaactgtaactttgaagcaaggtgaaatcaaggatgctactccttcagattttgttcgcgctactgcaacgataccgatacaagcctcactccctttcggatggcttattgttggcgttgcacttcttgctgtttttcagagcgcttccaaaatcataaccctcaaaaagagatggcaactagcactctccaagggtgttcactttgtttgcaacttgctgttgttgtttgtaacagtttactcacaccttttgctcgttgctgctggccttgaagccccttttctctatctttatgctttagtctacttcttgcagagtataaactttgtaagaataataatgaggctttggctttgctggaaatgccgttccaaaaacccattactttatgatgccaactattttctttgctggcatactaattgttacgactattgtataccttacaatagtgtaacttcttcaattgtcattacttcaggtgatggcacaacaagtcctatttctgaacatgactaccagattggtggttatactgaaaaatgggaatctggagtaaaagactgtgttgtattacacagttacttcacttcagactattaccagctgtactcaactcaattgagtacagacactggtgttgaacatgttaccttcttcatctacaataaaattgttgatgagcctgaagaacatgtccaaattcacacaatcgacggttcatccggagttgttaatccagtaatggaaccaatttatgatgaaccgacgacgactactagcgtgcctttgtaagcacaagctgatgagtacgaacttatgtactcattcgtttcggaagagacaggtacgttaatagttaatagcgtacttctttttcttgctttcgtggtattcttgctagttacactagccatccttactgcgcttcgattgtgtgcgtactgctgcaatattgttaacgtgagtcttgtaaaaccttctttttacgtttactctcgtgttaaaaatctgaattcttctagagttcctgatcttctggtctaaacgaactaaatattatattagtttttctgtttggaactttaattttagccatggcagattccaacggtactattaccgttgaagagcttaaaaagctccttgaacaatggaacctagtaataggtttcctattccttacatggatttgtcttctacaatttgcctatgccaacaggaataggtttttgtatataattaagttaattttcctctggctgttatggccagtaactttagcttgttttgtgcttgctgctgtttacagaataaattggatcaccggtggaattgctatcgcaatggcttgtcttgtaggcttgatgtggctcagctacttcattgcttctttcagactgtttgcgcgtacgcgttccatgtggtcattcaatccagaaactaacattcttctcaacgtgccactccatggcactattctgaccagaccgcttctagaaagtgaactcgtaatcggagctgtgatccttcgtggacatcttcgtattgctggacaccatctaggacgctgtgacatcaaggacctgcctaaagaaatcactgttgctacatcacgaacgctttcttattacaaattgggagcttcgcagcgtgtagcaggtgactcaggttttgctgcatacagtcgctacaggattggcaactataaattaaacacagaccattccagtagcagtgacaatattgctttgcttgtacagtaagtgacaacagatgtttcatctcgttgactttcaggttactatagcagagatattactaattattatgaggacttttaaagtttccatttggaatcttgattacatcataaacctcataattaaaaatttatctaagtcactaactgagaataaatattctcaattagatgaagagcaaccaatggagattgattaaacgaacatgaaaattattcttttcttggcactgataacactcgctacttgtgagctttatcactaccaagagtgtgttagaggtacaacagtacttttaaaagaaccttgctcttctggaacatacgagggcaattcaccatttcatcctctagctgataacaaatttgcactgacttgctttagcactcaatttgcttttgcttgtcctgacggcgtaaaacacgtctatcagttacgtgccagatcagtttcacctaaactgttcatcagacaagaggaagttcaagaactttactctccaatttttcttattgttgcggcaatagtgtttataacactttgcttcacactcaaaagaaagacagaatgattgaactttcattaattgacttctatttgtgctttttagcctttctgctattccttgttttaattatgcttattatcttttggttctcacttgaactgcaagatcataatgaaacttgtcacgcctaaacgaacatgaaatttcttgttttcttaggaatcatcacaactgtagctgcatttcaccaagaatgtagtttacagtcatgtactcaacatcaaccatatgtagttgatgacccgtgtcctattcacttctattctaaatggtatattagagtaggagctagaaaatcagcacctttaattgaattgtgcgtggatgaggctggttctaaatcacccattcagtacatcgatatcggtaattatacagtttcctgtttaccttttacaattaattgccaggaacctaaattgggtagtcttgtagtgcgttgttcgttctatgaagactttttagagtatcatgacgttcgtgttgttttagatttcatctaaacgaacaaactaaaatgtctgataatggaccccaaaatcagcgaaatgcaccccgcattacgtttggtggaccctcagattcaactggcagtaaccagaatggagaacgcagtggggcgcgatcaaaacaacgtcggccccaaggtttacccaataatactgcgtcttggttcaccgctctcactcaacatggcaaggaagaccttaaattccctcgaggacaaggcgttccaattaacaccaatagcagtccagatgaccaaattggctactaccgaagagctaccagacgaattcgtggtggtgacggtaaaatgaaagatctcagtccaagatggtatttctactacctaggaactgggccagaagctggacttccctatggtgctaacaaagacggcatcatatgggttgcaactgagggagccttgaatacaccaaaagatcacattggcacccgcaatcctgctaacaatgctgcaatcgtgctacaacttcctcaaggaacaacattgccaaaaggcttctacgcagaagggagcagaggcggcagtcaagcctcttctcgttcctcatcacgtagtcgcaacagttcaagaaattcaactccaggcagcagtaggggaacttctcctgctagaatggctggcaatggcggtgatgctgctcttgctttgctgctgcttgacagattgaaccagcttgagagcaaaatgtctggtaaaggccaacaacaacaaggccaaactgtcactaagaaatctgctgctgaggcttctaagaagcctcggcaaaaacgtactgccactaaagcatacaatgtaacacaagctttcggcagacgtggtccagaacaaacccaaggaaattttggggaccaggaactaatcagacaaggaactgattacaaacattggccgcaaattgcacaatttgcccccagcgcttcagcgttcttcggaatgtcgcgcattggcatggaagtcacaccttcgggaacgtggttgacctacacaggtgccatcaaattggatgacaaagatccaaatttcaaagatcaagtcattttgctgaataagcatattgacgcatacaaaacattcccaccaacagagcctaaaaaggacaaaaagaagaaggctgatgaaactcaagccttaccgcagagacagaagaaacagcaaactgtgactcttcttcctgctgcagatttggatgatttctccaaacaattgcaacaatccatgagcagtgctgactcaactcaggcctaaactcatgcagaccacacaaggcagatgggctatataaacgttttcgcttttccgtttacgatatatagtctactcttgtgcagaatgaattctcgtaactacatagcacaagtagatgtagttaactttaatctcacatagcaatctttaatcagtgtgtaacattagggaggacttgaaagagccaccacattttcaccgaggccacgcggagtacgatcgagtgtacagtgaacaatgctagggagagctgcctatatggaagagccctaatgtgtaaaattaattttagtagtgctatccccatgtgattttaatagcttcttaggagaatgacaaaaaaaaaaaaaaaaaaaaaaaaaaaaaaaaa

SEQ ID NO: 2 - DNA, 13217 bp, Severe acute respiratory syndrome coronavirus 2
atggagagccttgtccctggtttcaacgagaaaacacacgtccaactcagtttgcctgttttacaggttcgcgacgtgctcgtacgtggctttggagactccgtggaggaggtcttatcagaggcacgtcaacatcttaaagatggcacttgtggcttagtagaagttgaaaaaggcgttttgcctcaacttgaacagccctatgtgttcatcaaacgttcggatgctcgaactgcacctcatggtcatgttatggttgagctggtagcagaactcgaaggcattcagtacggtcgtagtggtgagacacttggtgtccttgtccctcatgtgggcgaaataccagtggcttaccgcaaggttcttcttcgtaagaacggtaataaaggagctggtggccatagttacggcgccgatctaaagtcatttgacttaggcgacgagcttggcactgatccttatgaagattttcaagaaaactggaacactaaacatagcagtggtgttacccgtgaactcatgcgtgagcttaacggaggggcatacactcgctatgtcgataacaacttctgtggccctgatggctaccctcttgagtgcattaaagaccttctagcacgtgctggtaaagcttcatgcactttgtccgaacaactggactttattgacactaagaggggtgtatactgctgccgtgaacatgagcatgaaattgcttggtacacggaacgttctgaaaagagctatgaattgcagacaccttttgaaattaaattggcaaagaaatttgacaccttcaatggggaatgtccaaattttgtatttcccttaaattccataatcaagactattcaaccaagggttgaaaagaaaaagcttgatggctttatgggtagaattcgatctgtctatccagttgcgtcaccaaatgaatgcaaccaaatgtgcctttcaactctcatgaagtgtgatcattgtggtgaaacttcatggcagacgggcgattttgttaaagccacttgcgaattttgtggcactgagaatttgactaaagaaggtgccactacttgtggttacttaccccaaaatgctgttgttaaaatttattgtccagcatgtcacaattcagaagtaggacctgagcatagtcttgccgaataccataatgaatctggcttgaaaaccattcttcgtaagggtggtcgcactattgcctttggaggctgtgtgttctcttatgttggttgccataacaagtgtgcctattgggttccacgtgctagcgctaacataggttgtaaccatacaggtgttgttggagaaggttccgaaggtcttaatgacaaccttcttgaaatactccaaaaagagaaagtcaacatcaatattgttggtgactttaaacttaatgaagagatcgccattattttggcatctttttctgcttccacaagtgcttttgtggaaactgtgaaaggtttggattataaagcattcaaacaaattgttgaatcctgtggtaattttaaagttacaaaaggaaaagctaaaaaaggtgcctggaatattggtgaacagaaatcaatactgagtcctctttatgcatttgcatcagaggctgctcgtgttgtacgatcaattttctcccgcactcttgaaactgctcaaaattctgtgcgtgttttacagaaggccgctataacaatactagatggaatttcacagtattcactgagactcattgatgctatgatgttcacatctgatttggctactaacaatctagttgtaatggcctacattacaggtggtgttgttcagttgacttcgcagtggctaactaacatctttggcactgtttatgaaaaactcaaacccgtccttgattggcttgaagagaagtttaaggaaggtgtagagtttcttagagacggttgggaaattgttaaatttatctcaacctgtgcttgtgaaattgtcggtggacaaattgtcacctgtgcaaaggaaattaaggagagtgttcagacattctttaagcttgtaaataaatttttggctttgtgtgctgactctatcattattggtggagctaaacttaaagccttgaatttaggtgaaacatttgtcacgcactcaaagggattgtacagaaagtgtgttaaatccagagaagaaactggcctactcatgcctctaaaagccccaaaagaaattatcttcttagagggagaaacacttcccacagaagtgttaacagaggaagttgtcttgaaaactggtgatttacaaccattagaacaacctactagtgaagctgttgaagctccattggttggtacaccagtttgtattaacgggcttatgttgctcgaaatcaaagacacagaaaagtactgtgcccttgcacctaatatgatggtaacaaacaataccttcacactcaaaggcggtgcaccaacaaaggttacttttggtgatgacactgtgatagaagtgcaaggttacaagagtgtgaatatcacttttgaacttgatgaaaggattgataaagtacttaatgagaagtgctctgcctatacagttgaactcggtacagaagtaaatgagttcgcctgtgttgtggcagatgctgtcataaaaactttgcaaccagtatctgaattacttacaccactgggcattgatttagatgagtggagtatggctacatactacttatttgatgagtctggtgagtttaaattggcttcacatatgtattgttctttctaccctccagatgaggatgaagaagaaggtgattgtgaagaagaagagtttgagccatcaactcaatatgagtatggtactgaagatgattaccaaggtaaacctttggaatttggtgccacttctgctgctcttcaacctgaagaagagcaagaagaagattggttagatgatgatagtcaacaaactgttggtcaacaagacggcagtgaggacaatcagacaactactattcaaacaattgttgaggttcaacctcaattagagatggaacttacaccagttgttcagactattgaagtgaatagttttagtggttatttaaaacttactgacaatgtatacattaaaaatgcagacattgtggaagaagctaaaaaggtaaaaccaacagtggttgttaatgcagccaatgtttaccttaaacatggaggaggtgttgcaggagccttaaataaggctactaacaatgccatgcaagttgaatctgatgattacatagctactaatggaccacttaaagtgggtggtagttgtgttttaagcggacacaatcttgctaaacactgtcttcatgttgtcggcccaaatgttaacaaaggtgaagacattcaacttcttaagagtgcttatgaaaattttaatcagcacgaagttctacttgcaccattattatcagctggtatttttggtgctgaccctatacattctttaagagtttgtgtagatactgttcgcacaaatgtctacttagctgtctttgataaaaatctctatgacaaacttgtttcaagctttttggaaatgaagagtgaaaagcaagttgaacaaaagatcgctgagattcctaaagaggaagttaagccatttataactgaaagtaaaccttcagttgaacagagaaaacaagatgataagaaaatcaaagcttgtgttgaagaagttacaacaactctggaagaaactaagttcctcacagaaaacttgttactttatattgacattaatggcaatcttcatccagattctgccactcttgttagtgacattgacatcactttcttaaagaaagatgctccatatatagtgggtgatgttgttcaagagggtgttttaactgctgtggttatacctactaaaaaggctggtggcactactgaaatgctagcgaaagctttgagaaaagtgccaacagacaattatataaccacttacccgggtcagggtttaaatggttacactgtagaggaggcaaagacagtgcttaaaaagtgtaaaagtgccttttacattctaccatctattatctctaatgagaagcaagaaattcttggaactgtttcttggaatttgcgagaaatgcttgcacatgcagaagaaacacgcaaattaatgcctgtctgtgtggaaactaaagccatagtttcaactatacagcgtaaatataagggtattaaaatacaagagggtgtggttgattatggtgctagattttacttttacaccagtaaaacaactgtagcgtcacttatcaacacacttaacgatctaaatgaaactcttgttacaatgccacttggctatgtaacacatggcttaaatttggaagaagctgctcggtatatgagatctctcaaagtgccagctacagtttctgtttcttcacctgatgctgttacagcgtataatggttatcttacttcttcttctaaaacacctgaagaacattttattgaaaccatctcacttgctggttcctataaagattggtcctattctggacaatctacacaactaggtatagaatttcttaagagaggtgataaaagtgtatattacactagtaatcctaccacattccacctagatggtgaagttatcacctttgacaatcttaagacacttctttctttgagagaagtgaggactattaaggtgtttacaacagtagacaacattaacctccacacgcaagttgtggacatgtcaatgacatatggacaacagtttggtccaacttatttggatggagctgatgttactaaaataaaacctcataattcacatgaaggtaaaacattttatgttttacctaatgatgacactctacgtgttgaggcttttgagtactaccacacaactgatcctagttttctgggtaggtacatgtcagcattaaatcacactaaaaagtggaaatacccacaagttaatggtttaacttctattaaatgggcagataacaactgttatcttgccactgcattgttaacactccaacaaatagagttgaagtttaatccacctgctctacaagatgcttattacagagcaagggctggtgaagctgctaacttttgtgcacttatcttagcctactgtaataagacagtaggtgagttaggtgatgttagagaaacaatgagttacttgtttcaacatgccaatttagattcttgcaaaagagtcttgaacgtggtgtgtaaaacttgtggacaacagcagacaacccttaagggtgtagaagctgttatgtacatgggcacactttcttatgaacaatttaagaaaggtgttcagataccttgtacgtgtggtaaacaagctacaaaatatctagtacaacaggagtcaccttttgttatgatgtcagcaccacctgctcagtatgaacttaagcatggtacatttacttgtgctagtgagtacactggtaattaccagtgtggtcactataaacatataacttctaaagaaactttgtattgcatagacggtgctttacttacaaagtcctcagaatacaaaggtcctattacggatgttttctacaaagaaaacagttacacaacaaccataaaaccagttacttataaattggatggtgttgtttgtacagaaattgaccctaagttggacaattattataagaaagacaattcttatttcacagagcaaccaattgatcttgtaccaaaccaaccatatccaaacgcaagcttcgataattttaagtttgtatgtgataatatcaaatttgctgatgatttaaaccagttaactggttataagaaacctgcttcaagagagcttaaagttacatttttccctgacttaaatggtgatgtggtggctattgattataaacactacacaccctcttttaagaaaggagctaaattgttacataaacctattgtttggcatgttaacaatgcaactaataaagccacgtataaaccaaatacctggtgtatacgttgtctttggagcacaaaaccagttgaaacatcaaattcgtttgatgtactgaagtcagaggacgcgcagggaatggataatcttgcctgcgaagatctaaaaccagtctctgaagaagtagtggaaaatcctaccatacagaaagacgttcttgagtgtaatgtgaaaactaccgaagttgtaggagacattatacttaaaccagcaaataatagtttaaaaattacagaagaggttggccacacagatctaatggctgcttatgtagacaattctagtcttactattaagaaacctaatgaattatctagagtattaggtttgaaaacccttgctactcatggtttagctgctgttaatagtgtcccttgggatactatagctaattatgctaagccttttcttaacaaagttgttagtacaactactaacatagttacacggtgtttaaaccgtgtttgtactaattatatgccttatttctttactttattgctacaattgtgtacttttactagaagtacaaattctagaattaaagcatctatgccgactactatagcaaagaatactgttaagagtgtcggtaaattttgtctagaggcttcatttaattatttgaagtcacctaatttttctaaactgataaatattataatttggtttttactattaagtgtttgcctaggttctttaatctactcaaccgctgctttaggtgttttaatgtctaatttaggcatgccttcttactgtactggttacagagaaggctatttgaactctactaatgtcactattgcaacctactgtactggttctataccttgtagtgtttgtcttagtggtttagattctttagacacctatccttctttagaaactatacaaattaccatttcatcttttaaatgggatttaactgcttttggcttagttgcagagtggtttttggcatatattcttttcactaggtttttctatgtacttggattggctgcaatcatgcaattgtttttcagctattttgcagtacattttattagtaattcttggcttatgtggttaataattaatcttgtacaaatggccccgatttcagctatggttagaatgtacatcttctttgcatcattttattatgtatggaaaagttatgtgcatgttgtagacggttgtaattcatcaacttgtatgatgtgttacaaacgtaatagagcaacaagagtcgaatgtacaactattgttaatggtgttagaaggtccttttatgtctatgctaatggaggtaaaggcttttgcaaactacacaattggaattgtgttaattgtgatacattctgtgctggtagtacatttattagtgatgaagttgcgagagacttgtcactacagtttaaaagaccaataaatcctactgaccagtcttcttacatcgttgatagtgttacagtgaagaatggttccatccatctttactttgataaagctggtcaaaagacttatgaaagacattctctctctcattttgttaacttagacaacctgagagctaataacactaaaggttcattgcctattaatgttatagtttttgatggtaaatcaaaatgtgaagaatcatctgcaaaatcagcgtctgtttactacagtcagcttatgtgtcaacctatactgttactagatcaggcattagtgtctgatgttggtgatagtgcggaagttgcagttaaaatgtttgatgcttacgttaatacgttttcatcaacttttaacgtaccaatggaaaaactcaaaacactagttgcaactgcagaagctgaacttgcaaagaatgtgtccttagacaatgtcttatctacttttatttcagcagctcggcaagggtttgttgattcagatgtagaaactaaagatgttgttgaatgtcttaaattgtcacatcaatctgacatagaagttactggcgatagttgtaataactatatgctcacctataacaaagttgaaaacatgacaccccgtgaccttggtgcttgtattgactgtagtgcgcgtcatattaatgcgcaggtagcaaaaagtcacaacattgctttgatatggaacgttaaagatttcatgtcattgtctgaacaactacgaaaacaaatacgtagtgctgctaaaaagaataacttaccttttaagttgacatgtgcaactactagacaagttgttaatgttgtaacaacaaagatagcacttaagggtggtaaaattgttaataattggttgaagcagttaattaaagttacacttgtgttcctttttgttgctgctattttctatttaataacacctgttcatgtcatgtctaaacatactgacttttcaagtgaaatcataggatacaaggctattgatggtggtgtcactcgtgacatagcatctacagatacttgttttgctaacaaacatgctgattttgacacatggtttagccagcgtggtggtagttatactaatgacaaagcttgcccattgattgctgcagtcataacaagagaagtgggttttgtcgtgcctggtttgcctggcacgatattacgcacaactaatggtgactttttgcatttcttacctagagtttttagtgcagttggtaacatctgttacacaccatcaaaacttatagagtacactgactttgcaacatcagcttgtgttttggctgctgaatgtacaatttttaaagatgcttctggtaagccagtaccatattgttatgataccaatgtactagaaggttctgttgcttatgaaagtttacgccctgacacacgttatgtgctcatggatggctctattattcaatttcctaacacctaccttgaaggttctgttagagtggtaacaacttttgattctgagtactgtaggcacggcacttgtgaaagatcagaagctggtgtttgtgtatctactagtggtagatgggtacttaacaatgattattacagatctttaccaggagttttctgtggtgtagatgctgtaaatttacttactaatatgtttacaccactaattcaacctattggtgctttggacatatcagcatctatagtagctggtggtattgtagctatcgtagtaacatgccttgcctactattttatgaggtttagaagagcttttggtgaatacagtcatgtagttgcctttaatactttactattccttatgtcattcactgtactctgtttaacaccagtttactcattcttacctggtgtttattctgttatttacttgtacttgacattttatcttactaatgatgtttcttttttagcacatattcagtggatggttatgttcacacctttagtacctttctggataacaattgcttatatcatttgtatttccacaaagcatttctattggttctttagtaattacctaaagagacgtgtagtctttaatggtgtttcctttagtacttttgaagaagctgcgctgtgcacctttttgttaaataaagaaatgtatctaaagttgcgtagtgatgtgctattacctcttacgcaatataatagatacttagctctttataataagtacaagtattttagtggagcaatggatacaactagctacagagaagctgcttgttgtcatctcgcaaaggctctcaatgacttcagtaactcaggttctgatgttctttaccaaccaccacaaacctctatcacctcagctgttttgcagagtggttttagaaaaatggcattcccatctggtaaagttgagggttgtatggtacaagtaacttgtggtacaactacacttaacggtctttggcttgatgacgtagtttactgtccaagacatgtgatctgcacctctgaagacatgcttaaccctaattatgaagatttactcattcgtaagtctaatcataatttcttggtacaggctggtaatgttcaactcagggttattggacattctatgcaaaattgtgtacttaagcttaaggttgatacagccaatcctaagacacctaagtataagtttgttcgcattcaaccaggacagactttttcagtgttagcttgttacaatggttcaccatctggtgtttaccaatgtgctatgaggcccaatttcactattaagggttcattccttaatggttcatgtggtagtgttggttttaacatagattatgactgtgtctctttttgttacatgcaccatatggaattaccaactggagttcatgctggcacagacttagaaggtaacttttatggaccttttgttgacaggcaaacagcacaagcagctggtacggacacaactattacagttaatgttttagcttggttgtacgctgctgttataaatggagacaggtggtttctcaatcgatttaccacaactcttaatgactttaaccttgtggctatgaagtacaattatgaacctctaacacaagaccatgttgacatactaggacctctttctgctcaaactggaattgccgttttagatatgtgtgcttcattaaaagaattactgcaaaatggtatgaatggacgtaccatattgggtagtgctttattagaagatgaatttacaccttttgatgttgttagacaatgctcaggtgttactttccaaagtgcagtgaaaagaacaatcaagggtacacaccactggttgttactcacaattttgacttcacttttagttttagtccagagtactcaatggtctttgttcttttttttgtatgaaaatgcctttttaccttttgctatgggtattattgctatgtctgcttttgcaatgatgtttgtcaaacataagcatgcatttctctgtttgtttttgttaccttctcttgccactgtagcttattttaatatggtctatatgcctgctagttgggtgatgcgtattatgacatggttggatatggttgatactagtttgtctggttttaagctaaaagactgtgttatgtatgcatcagctgtagtgttactaatccttatgacagcaagaactgtgtatgatgatggtgctaggagagtgtggacacttatgaatgtcttgacactcgtttataaagtttattatggtaatgctttagatcaagccatttccatgtgggctcttataatctctgttacttctaactactcaggtgtagttacaactgtcatgtttttggccagaggtattgtttttatgtgtgttgagtattgccctattttcttcataactggtaatacacttcagtgtataatgctagtttattgtttcttaggctatttttgtacttgttactttggcctcttttgtttactcaaccgctactttagactgactcttggtgtttatgattacttagtttctacacaggagtttagatatatgaattcacagggactactcccacccaagaatagcatagatgccttcaaactcaacattaaattgttgggtgttggtggcaaaccttgtatcaaagtagccactgtacagtctaaaatgtcagatgtaaagtgcacatcagtagtcttactctcagttttgcaacaactcagagtagaatcatcatctaaattgtgggctcaatgtgtccagttacacaatgacattctcttagctaaagatactactgaagcctttgaaaaaatggtttcactactttctgttttgctttccatgcagggtgctgtagacataaacaagctttgtgaagaaatgctggacaacagggcaaccttacaagctatagcctcagagtttagttcccttccatcatatgcagcttttgctactgctcaagaagcttatgagcaggctgttgctaatggtgattctgaagttgttcttaaaaagttgaagaagtctttgaatgtggctaaatctgaatttgaccgtgatgcagccatgcaacgtaagttggaaaagatggctgatcaagctatgacccaaatgtataaacaggctagatctgaggacaagagggcaaaagttactagtgctatgcagacaatgcttttcactatgcttagaaagttggataatgatgcactcaacaacattatcaacaatgcaagagatggttgtgttcccttgaacataatacctcttacaacagcagccaaactaatggttgtcataccagactataacacatataaaaatacgtgtgatggtacaacatttacttatgcatcagcattgtgggaaatccaacaggttgtagatgcagatagtaaaattgttcaacttagtgaaattagtatggacaattcacctaatttagcatggcctcttattgtaacagctttaagggccaattctgctgtcaaattacagaataatgagcttagtcctgttgcactacgacagatgtcttgtgctgccggtactacacaaactgcttgcactgatgacaatgcgttagcttactacaacacaacaaagggaggtaggtttgtacttgcactgttatccgatttacaggatttgaaatgggctagattccctaagagtgatggaactggtactatctatacagaactggaaccaccttgtaggtttgttacagacacacctaaaggtcctaaagtgaagtatttatactttattaaaggattaaacaacctaaatagaggtatggtacttggtagtttagctgccacagtacgtctacaagctggtaatgcaacagaagtgcctgccaattcaactgtattatctttctgtgcttttgctgtagatgctgctaaagcttacaaagattatctagctagtgggggacaaccaatcactaattgtgttaagatgttgtgtacacacactggtactggtcaggcaataacagttacaccggaagccaatatggatcaagaatcctttggtggtgcatcgtgttgtctgtactgccgttgccacatagatcatccaaatcctaaaggattttgtgacttaaaaggtaagtatgtacaaatacctacaacttgtgctaatgaccctgtgggttttacacttaaaaacacagtctgtaccgtctgcggtatgtggaaaggttatggctgtagttgtgatcaactccgcgaacccatgcttcagtcagctgatgcacaatcgtttttaaacgggtttgcggtgta

SEQ ID NO: 3 - DNA, 21289 bp, Severe acute respiratory syndrome coronavirus 2
atggagagccttgtccctggtttcaacgagaaaacacacgtccaactcagtttgcctgttttacaggttcgcgacgtgctcgtacgtggctttggagactccgtggaggaggtcttatcagaggcacgtcaacatcttaaagatggcacttgtggcttagtagaagttgaaaaaggcgttttgcctcaacttgaacagccctatgtgttcatcaaacgttcggatgctcgaactgcacctcatggtcatgttatggttgagctggtagcagaactcgaaggcattcagtacggtcgtagtggtgagacacttggtgtccttgtccctcatgtgggcgaaataccagtggcttaccgcaaggttcttcttcgtaagaacggtaataaaggagctggtggccatagttacggcgccgatctaaagtcatttgacttaggcgacgagcttggcactgatccttatgaagattttcaagaaaactggaacactaaacatagcagtggtgttacccgtgaactcatgcgtgagcttaacggaggggcatacactcgctatgtcgataacaacttctgtggccctgatggctaccctcttgagtgcattaaagaccttctagcacgtgctggtaaagcttcatgcactttgtccgaacaactggactttattgacactaagaggggtgtatactgctgccgtgaacatgagcatgaaattgcttggtacacggaacgttctgaaaagagctatgaattgcagacaccttttgaaattaaattggcaaagaaatttgacaccttcaatggggaatgtccaaattttgtatttcccttaaattccataatcaagactattcaaccaagggttgaaaagaaaaagcttgatggctttatgggtagaattcgatctgtctatccagttgcgtcaccaaatgaatgcaaccaaatgtgcctttcaactctcatgaagtgtgatcattgtggtgaaacttcatggcagacgggcgattttgttaaagccacttgcgaattttgtggcactgagaatttgactaaagaaggtgccactacttgtggttacttaccccaaaatgctgttgttaaaatttattgtccagcatgtcacaattcagaagtaggacctgagcatagtcttgccgaataccataatgaatctggcttgaaaaccattcttcgtaagggtggtcgcactattgcctttggaggctgtgtgttctcttatgttggttgccataacaagtgtgcctattgggttccacgtgctagcgctaacataggttgtaaccatacaggtgttgttggagaaggttccgaaggtcttaatgacaaccttcttgaaatactccaaaaagagaaagtcaacatcaatattgttggtgactttaaacttaatgaagagatcgccattattttggcatctttttctgcttccacaagtgcttttgtggaaactgtgaaaggtttggattataaagcattcaaacaaattgttgaatcctgtggtaattttaaagttacaaaaggaaaagctaaaaaaggtgcctggaatattggtgaacagaaatcaatactgagtcctctttatgcatttgcatcagaggctgctcgtgttgtacgatcaattttctcccgcactcttgaaactgctcaaaattctgtgcgtgttttacagaaggccgctataacaatactagatggaatttcacagtattcactgagactcattgatgctatgatgttcacatctgatttggctactaacaatctagttgtaatggcctacattacaggtggtgttgttcagttgacttcgcagtggctaactaacatctttggcactgtttatgaaaaactcaaacccgtccttgattggcttgaagagaagtttaaggaaggtgtagagtttcttagagacggttgggaaattgttaaatttatctcaacctgtgcttgtgaaattgtcggtggacaaattgtcacctgtgcaaaggaaattaaggagagtgttcagacattctttaagcttgtaaataaatttttggctttgtgtgctgactctatcattattggtggagctaaacttaaagccttgaatttaggtgaaacatttgtcacgcactcaaagggattgtacagaaagtgtgttaaatccagagaagaaactggcctactcatgcctctaaaagccccaaaagaaattatcttcttagagggagaaacacttcccacagaagtgttaacagaggaagttgtcttgaaaactggtgatttacaaccattagaacaacctactagtgaagctgttgaagctccattggttggtacaccagtttgtattaacgggcttatgttgctcgaaatcaaagacacagaaaagtactgtgcccttgcacctaatatgatggtaacaaacaataccttcacactcaaaggcggtgcaccaacaaaggttacttttggtgatgacactgtgatagaagtgcaaggttacaagagtgtgaatatcacttttgaacttgatgaaaggattgataaagtacttaatgagaagtgctctgcctatacagttgaactcggtacagaagtaaatgagttcgcctgtgttgtggcagatgctgtcataaaaactttgcaaccagtatctgaattacttacaccactgggcattgatttagatgagtggagtatggctacatactacttatttgatgagtctggtgagtttaaattggcttcacatatgtattgttctttctaccctccagatgaggatgaagaagaaggtgattgtgaagaagaagagtttgagccatcaactcaatatgagtatggtactgaagatgattaccaaggtaaacctttggaatttggtgccacttctgctgctcttcaacctgaagaagagcaagaagaagattggttagatgatgatagtcaacaaactgttggtcaacaagacggcagtgaggacaatcagacaactactattcaaacaattgttgaggttcaacctcaattagagatggaacttacaccagttgttcagactattgaagtgaatagttttagtggttatttaaaacttactgacaatgtatacattaaaaatgcagacattgtggaagaagctaaaaaggtaaaaccaacagtggttgttaatgcagccaatgtttaccttaaacatggaggaggtgttgcaggagccttaaataaggctactaacaatgccatgcaagttgaatctgatgattacatagctactaatggaccacttaaagtgggtggtagttgtgttttaagcggacacaatcttgctaaacactgtcttcatgttgtcggcccaaatgttaacaaaggtgaagacattcaacttcttaagagtgcttatgaaaattttaatcagcacgaagttctacttgcaccattattatcagctggtatttttggtgctgaccctatacattctttaagagtttgtgtagatactgttcgcacaaatgtctacttagctgtctttgataaaaatctctatgacaaacttgtttcaagctttttggaaatgaagagtgaaaagcaagttgaacaaaagatcgctgagattcctaaagaggaagttaagccatttataactgaaagtaaaccttcagttgaacagagaaaacaagatgataagaaaatcaaagcttgtgttgaagaagttacaacaactctggaagaaactaagttcctcacagaaaacttgttactttatattgacattaatggcaatcttcatccagattctgccactcttgttagtgacattgacatcactttcttaaagaaagatgctccatatatagtgggtgatgttgttcaagagggtgttttaactgctgtggttatacctactaaaaaggctggtggcactactgaaatgctagcgaaagctttgagaaaagtgccaacagacaattatataaccacttacccgggtcagggtttaaatggttacactgtagaggaggcaaagacagtgcttaaaaagtgtaaaagtgccttttacattctaccatctattatctctaatgagaagcaagaaattcttggaactgtttcttggaatttgcgagaaatgcttgcacatgcagaagaaacacgcaaattaatgcctgtctgtgtggaaactaaagccatagtttcaactatacagcgtaaatataagggtattaaaatacaagagggtgtggttgattatggtgctagattttacttttacaccagtaaaacaactgtagcgtcacttatcaacacacttaacgatctaaatgaaactcttgttacaatgccacttggctatgtaacacatggcttaaatttggaagaagctgctcggtatatgagatctctcaaagtgccagctacagtttctgtttcttcacctgatgctgttacagcgtataatggttatcttacttcttcttctaaaacacctgaagaacattttattgaaaccatctcacttgctggttcctataaagattggtcctattctggacaatctacacaactaggtatagaatttcttaagagaggtgataaaagtgtatattacactagtaatcctaccacattccacctagatggtgaagttatcacctttgacaatcttaagacacttctttctttgagagaagtgaggactattaaggtgtttacaacagtagacaacattaacctccacacgcaagttgtggacatgtcaatgacatatggacaacagtttggtccaacttatttggatggagctgatgttactaaaataaaacctcataattcacatgaaggtaaaacattttatgttttacctaatgatgacactctacgtgttgaggcttttgagtactaccacacaactgatcctagttttctgggtaggtacatgtcagcattaaatcacactaaaaagtggaaatacccacaagttaatggtttaacttctattaaatgggcagataacaactgttatcttgccactgcattgttaacactccaacaaatagagttgaagtttaatccacctgctctacaagatgcttattacagagcaagggctggtgaagctgctaacttttgtgcacttatcttagcctactgtaataagacagtaggtgagttaggtgatgttagagaaacaatgagttacttgtttcaacatgccaatttagattcttgcaaaagagtcttgaacgtggtgtgtaaaacttgtggacaacagcagacaacccttaagggtgtagaagctgttatgtacatgggcacactttcttatgaacaatttaagaaaggtgttcagataccttgtacgtgtggtaaacaagctacaaaatatctagtacaacaggagtcaccttttgttatgatgtcagcaccacctgctcagtatgaacttaagcatggtacatttacttgtgctagtgagtacactggtaattaccagtgtggtcactataaacatataacttctaaagaaactttgtattgcatagacggtgctttacttacaaagtcctcagaatacaaaggtcctattacggatgttttctacaaagaaaacagttacacaacaaccataaaaccagttacttataaattggatggtgttgtttgtacagaaattgaccctaagttggacaattattataagaaagacaattcttatttcacagagcaaccaattgatcttgtaccaaaccaaccatatccaaacgcaagcttcgataattttaagtttgtatgtgataatatcaaatttgctgatgatttaaaccagttaactggttataagaaacctgcttcaagagagcttaaagttacatttttccctgacttaaatggtgatgtggtggctattgattataaacactacacaccctcttttaagaaaggagctaaattgttacataaacctattgtttggcatgttaacaatgcaactaataaagccacgtataaaccaaatacctggtgtatacgttgtctttggagcacaaaaccagttgaaacatcaaattcgtttgatgtactgaagtcagaggacgcgcagggaatggataatcttgcctgcgaagatctaaaaccagtctctgaagaagtagtggaaaatcctaccatacagaaagacgttcttgagtgtaatgtgaaaactaccgaagttgtaggagacattatacttaaaccagcaaataatagtttaaaaattacagaagaggttggccacacagatctaatggctgcttatgtagacaattctagtcttactattaagaaacctaatgaattatctagagtattaggtttgaaaacccttgctactcatggtttagctgctgttaatagtgtcccttgggatactatagctaattatgctaagccttttcttaacaaagttgttagtacaactactaacatagttacacggtgtttaaaccgtgtttgtactaattatatgccttatttctttactttattgctacaattgtgtacttttactagaagtacaaattctagaattaaagcatctatgccgactactatagcaaagaatactgttaagagtgtcggtaaattttgtctagaggcttcatttaattatttgaagtcacctaatttttctaaactgataaatattataatttggtttttactattaagtgtttgcctaggttctttaatctactcaaccgctgctttaggtgttttaatgtctaatttaggcatgccttcttactgtactggttacagagaaggctatttgaactctactaatgtcactattgcaacctactgtactggttctataccttgtagtgtttgtcttagtggtttagattctttagacacctatccttctttagaaactatacaaattaccatttcatcttttaaatgggatttaactgcttttggcttagttgcagagtggtttttggcatatattcttttcactaggtttttctatgtacttggattggctgcaatcatgcaattgtttttcagctattttgcagtacattttattagtaattcttggcttatgtggttaataattaatcttgtacaaatggccccgatttcagctatggttagaatgtacatcttctttgcatcattttattatgtatggaaaagttatgtgcatgttgtagacggttgtaattcatcaacttgtatgatgtgttacaaacgtaatagagcaacaagagtcgaatgtacaactattgttaatggtgttagaaggtccttttatgtctatgctaatggaggtaaaggcttttgcaaactacacaattggaattgtgttaattgtgatacattctgtgctggtagtacatttattagtgatgaagttgcgagagacttgtcactacagtttaaaagaccaataaatcctactgaccagtcttcttacatcgttgatagtgttacagtgaagaatggttccatccatctttactttgataaagctggtcaaaagacttatgaaagacattctctctctcattttgttaacttagacaacctgagagctaataacactaaaggttcattgcctattaatgttatagtttttgatggtaaatcaaaatgtgaagaatcatctgcaaaatcagcgtctgtttactacagtcagcttatgtgtcaacctatactgttactagatcaggcattagtgtctgatgttggtgatagtgcggaagttgcagttaaaatgtttgatgcttacgttaatacgttttcatcaacttttaacgtaccaatggaaaaactcaaaacactagttgcaactgcagaagctgaacttgcaaagaatgtgtccttagacaatgtcttatctacttttatttcagcagctcggcaagggtttgttgattcagatgtagaaactaaagatgttgttgaatgtcttaaattgtcacatcaatctgacatagaagttactggcgatagttgtaataactatatgctcacctataacaaagttgaaaacatgacaccccgtgaccttggtgcttgtattgactgtagtgcgcgtcatattaatgcgcaggtagcaaaaagtcacaacattgctttgatatggaacgttaaagatttcatgtcattgtctgaacaactacgaaaacaaatacgtagtgctgctaaaaagaataacttaccttttaagttgacatgtgcaactactagacaagttgttaatgttgtaacaacaaagatagcacttaagggtggtaaaattgttaataattggttgaagcagttaattaaagttacacttgtgttcctttttgttgctgctattttctatttaataacacctgttcatgtcatgtctaaacatactgacttttcaagtgaaatcataggatacaaggctattgatggtggtgtcactcgtgacatagcatctacagatacttgttttgctaacaaacatgctgattttgacacatggtttagccagcgtggtggtagttatactaatgacaaagcttgcccattgattgctgcagtcataacaagagaagtgggttttgtcgtgcctggtttgcctggcacgatattacgcacaactaatggtgactttttgcatttcttacctagagtttttagtgcagttggtaacatctgttacacaccatcaaaacttatagagtacactgactttgcaacatcagcttgtgttttggctgctgaatgtacaatttttaaagatgcttctggtaagccagtaccatattgttatgataccaatgtactagaaggttctgttgcttatgaaagtttacgccctgacacacgttatgtgctcatggatggctctattattcaatttcctaacacctaccttgaaggttctgttagagtggtaacaacttttgattctgagtactgtaggcacggcacttgtgaaagatcagaagctggtgtttgtgtatctactagtggtagatgggtacttaacaatgattattacagatctttaccaggagttttctgtggtgtagatgctgtaaatttacttactaatatgtttacaccactaattcaacctattggtgctttggacatatcagcatctatagtagctggtggtattgtagctatcgtagtaacatgccttgcctactattttatgaggtttagaagagcttttggtgaatacagtcatgtagttgcctttaatactttactattccttatgtcattcactgtactctgtttaacaccagtttactcattcttacctggtgtttattctgttatttacttgtacttgacattttatcttactaatgatgtttcttttttagcacatattcagtggatggttatgttcacacctttagtacctttctggataacaattgcttatatcatttgtatttccacaaagcatttctattggttctttagtaattacctaaagagacgtgtagtctttaatggtgtttcctttagtacttttgaagaagctgcgctgtgcacctttttgttaaataaagaaatgtatctaaagttgcgtagtgatgtgctattacctcttacgcaatataatagatacttagctctttataataagtacaagtattttagtggagcaatggatacaactagctacagagaagctgcttgttgtcatctcgcaaaggctctcaatgacttcagtaactcaggttctgatgttctttaccaaccaccacaaacctctatcacctcagctgttttgcagagtggttttagaaaaatggcattcccatctggtaaagttgagggttgtatggtacaagtaacttgtggtacaactacacttaacggtctttggcttgatgacgtagtttactgtccaagacatgtgatctgcacctctgaagacatgcttaaccctaattatgaagatttactcattcgtaagtctaatcataatttcttggtacaggctggtaatgttcaactcagggttattggacattctatgcaaaattgtgtacttaagcttaaggttgatacagccaatcctaagacacctaagtataagtttgttcgcattcaaccaggacagactttttcagtgttagcttgttacaatggttcaccatctggtgtttaccaatgtgctatgaggcccaatttcactattaagggttcattccttaatggttcatgtggtagtgttggttttaacatagattatgactgtgtctctttttgttacatgcaccatatggaattaccaactggagttcatgctggcacagacttagaaggtaacttttatggaccttttgttgacaggcaaacagcacaagcagctggtacggacacaactattacagttaatgttttagcttggttgtacgctgctgttataaatggagacaggtggtttctcaatcgatttaccacaactcttaatgactttaaccttgtggctatgaagtacaattatgaacctctaacacaagaccatgttgacatactaggacctctttctgctcaaactggaattgccgttttagatatgtgtgcttcattaaaagaattactgcaaaatggtatgaatggacgtaccatattgggtagtgctttattagaagatgaatttacaccttttgatgttgttagacaatgctcaggtgttactttccaaagtgcagtgaaaagaacaatcaagggtacacaccactggttgttactcacaattttgacttcacttttagttttagtccagagtactcaatggtctttgttcttttttttgtatgaaaatgcctttttaccttttgctatgggtattattgctatgtctgcttttgcaatgatgtttgtcaaacataagcatgcatttctctgtttgtttttgttaccttctcttgccactgtagcttattttaatatggtctatatgcctgctagttgggtgatgcgtattatgacatggttggatatggttgatactagtttgtctggttttaagctaaaagactgtgttatgtatgcatcagctgtagtgttactaatccttatgacagcaagaactgtgtatgatgatggtgctaggagagtgtggacacttatgaatgtcttgacactcgtttataaagtttattatggtaatgctttagatcaagccatttccatgtgggctcttataatctctgttacttctaactactcaggtgtagttacaactgtcatgtttttggccagaggtattgtttttatgtgtgttgagtattgccctattttcttcataactggtaatacacttcagtgtataatgctagtttattgtttcttaggctatttttgtacttgttactttggcctcttttgtttactcaaccgctactttagactgactcttggtgtttatgattacttagtttctacacaggagtttagatatatgaattcacagggactactcccacccaagaatagcatagatgccttcaaactcaacattaaattgttgggtgttggtggcaaaccttgtatcaaagtagccactgtacagtctaaaatgtcagatgtaaagtgcacatcagtagtcttactctcagttttgcaacaactcagagtagaatcatcatctaaattgtgggctcaatgtgtccagttacacaatgacattctcttagctaaagatactactgaagcctttgaaaaaatggtttcactactttctgttttgctttccatgcagggtgctgtagacataaacaagctttgtgaagaaatgctggacaacagggcaaccttacaagctatagcctcagagtttagttcccttccatcatatgcagcttttgctactgctcaagaagcttatgagcaggctgttgctaatggtgattctgaagttgttcttaaaaagttgaagaagtctttgaatgtggctaaatctgaatttgaccgtgatgcagccatgcaacgtaagttggaaaagatggctgatcaagctatgacccaaatgtataaacaggctagatctgaggacaagagggcaaaagttactagtgctatgcagacaatgcttttcactatgcttagaaagttggataatgatgcactcaacaacattatcaacaatgcaagagatggttgtgttcccttgaacataatacctcttacaacagcagccaaactaatggttgtcataccagactataacacatataaaaatacgtgtgatggtacaacatttacttatgcatcagcattgtgggaaatccaacaggttgtagatgcagatagtaaaattgttcaacttagtgaaattagtatggacaattcacctaatttagcatggcctcttattgtaacagctttaagggccaattctgctgtcaaattacagaataatgagcttagtcctgttgcactacgacagatgtcttgtgctgccggtactacacaaactgcttgcactgatgacaatgcgttagcttactacaacacaacaaagggaggtaggtttgtacttgcactgttatccgatttacaggatttgaaatgggctagattccctaagagtgatggaactggtactatctatacagaactggaaccaccttgtaggtttgttacagacacacctaaaggtcctaaagtgaagtatttatactttattaaaggattaaacaacctaaatagaggtatggtacttggtagtttagctgccacagtacgtctacaagctggtaatgcaacagaagtgcctgccaattcaactgtattatctttctgtgcttttgctgtagatgctgctaaagcttacaaagattatctagctagtgggggacaaccaatcactaattgtgttaagatgttgtgtacacacactggtactggtcaggcaataacagttacaccggaagccaatatggatcaagaatcctttggtggtgcatcgtgttgtctgtactgccgttgccacatagatcatccaaatcctaaaggattttgtgacttaaaaggtaagtatgtacaaatacctacaacttgtgctaatgaccctgtgggttttacacttaaaaacacagtctgtaccgtctgcggtatgtggaaaggttatggctgtagttgtgatcaactccgcgaacccatgcttcagtcagctgatgcacaatcgtttttaaacgggtttgcggtgtaagtgcagcccgtcttacaccgtgcggcacaggcactagtactgatgtcgtatacagggcttttgacatctacaatgataaagtagctggttttgctaaattcctaaaaactaattgttgtcgcttccaagaaaaggacgaagatgacaatttaattgattcttactttgtagttaagagacacactttctctaactaccaacatgaagaaacaatttataatttacttaaggattgtccagctgttgctaaacatgacttctttaagtttagaatagacggtgacatggtaccacatatatcacgtcaacgtcttactaaatacacaatggcagacctcgtctatgctttaaggcattttgatgaaggtaattgtgacacattaaaagaaatacttgtcacatacaattgttgtgatgatgattatttcaataaaaaggactggtatgattttgtagaaaacccagatatattacgcgtatacgccaacttaggtgaacgtgtacgccaagctttgttaaaaacagtacaattctgtgatgccatgcgaaatgctggtattgttggtgtactgacattagataatcaagatctcaatggtaactggtatgatttcggtgatttcatacaaaccacgccaggtagtggagttcctgttgtagattcttattattcattgttaatgcctatattaaccttgaccagggctttaactgcagagtcacatgttgacactgacttaacaaagccttacattaagtgggatttgttaaaatatgacttcacggaagagaggttaaaactctttgaccgttattttaaatattgggatcagacataccacccaaattgtgttaactgtttggatgacagatgcattctgcattgtgcaaactttaatgttttattctctacagtgttcccacctacaagttttggaccactagtgagaaaaatatttgttgatggtgttccatttgtagtttcaactggataccacttcagagagctaggtgttgtacataatcaggatgtaaacttacatagctctagacttagttttaaggaattacttgtgtatgctgctgaccctgctatgcacgctgcttctggtaatctattactagataaacgcactacgtgcttttcagtagctgcacttactaacaatgttgcttttcaaactgtcaaacccggtaattttaacaaagacttctatgactttgctgtgtctaagggtttctttaaggaaggaagttctgttgaattaaaacacttcttctttgctcaggatggtaatgctgctatcagcgattatgactactatcgttataatctaccaacaatgtgtgatatcagacaactactatttgtagttgaagttgttgataagtactttgattgttacgatggtggctgtattaatgctaaccaagtcatcgtcaacaacctagacaaatcagctggttttccatttaataaatggggtaaggctagactttattatgattcaatgagttatgaggatcaagatgcacttttcgcatatacaaaacgtaatgtcatccctactataactcaaatgaatcttaagtatgccattagtgcaaagaatagagctcgcaccgtagctggtgtctctatctgtagtactatgaccaatagacagtttcatcaaaaattattgaaatcaatagccgccactagaggagctactgtagtaattggaacaagcaaattctatggtggttggcacaacatgttaaaaactgtttatagtgatgtagaaaaccctcaccttatgggttgggattatcctaaatgtgatagagccatgcctaacatgcttagaattatggcctcacttgttcttgctcgcaaacatacaacgtgttgtagcttgtcacaccgtttctatagattagctaatgagtgtgctcaagtattgagtgaaatggtcatgtgtggcggttcactatatgttaaaccaggtggaacctcatcaggagatgccacaactgcttatgctaatagtgtttttaacatttgtcaagctgtcacggccaatgttaatgcacttttatctactgatggtaacaaaattgccgataagtatgtccgcaatttacaacacagactttatgagtgtctctatagaaatagagatgttgacacagactttgtgaatgagttttacgcatatttgcgtaaacatttctcaatgatgatactctctgacgatgctgttgtgtgtttcaatagcacttatgcatctcaaggtctagtggctagcataaagaactttaagtcagttctttattatcaaaacaatgtttttatgtctgaagcaaaatgttggactgagactgaccttactaaaggacctcatgaattttgctctcaacatacaatgctagttaaacagggtgatgattatgtgtaccttccttacccagatccatcaagaatcctaggggccggctgttttgtagatgatatcgtaaaaacagatggtacacttatgattgaacggttcgtgtctttagctatagatgcttacccacttactaaacatcctaatcaggagtatgctgatgtctttcatttgtacttacaatacataagaaagctacatgatgagttaacaggacacatgttagacatgtattctgttatgcttactaatgataacacttcaaggtattgggaacctgagttttatgaggctatgtacacaccgcatacagtcttacaggctgttggggcttgtgttctttgcaattcacagacttcattaagatgtggtgcttgcatacgtagaccattcttatgttgtaaatgctgttacgaccatgtcatatcaacatcacataaattagtcttgtctgttaatccgtatgtttgcaatgctccaggttgtgatgtcacagatgtgactcaactttacttaggaggtatgagctattattgtaaatcacataaaccacccattagttttccattgtgtgctaatggacaagtttttggtttatataaaaatacatgtgttggtagcgataatgttactgactttaatgcaattgcaacatgtgactggacaaatgctggtgattacattttagctaacacctgtactgaaagactcaagctttttgcagcagaaacgctcaaagctactgaggagacatttaaactgtcttatggtattgctactgtacgtgaagtgctgtctgacagagaattacatctttcatgggaagttggtaaacctagaccaccacttaaccgaaattatgtctttactggttatcgtgtaactaaaaacagtaaagtacaaataggagagtacacctttgaaaaaggtgactatggtgatgctgttgtttaccgaggtacaacaacttacaaattaaatgttggtgattattttgtgctgacatcacatacagtaatgccattaagtgcacctacactagtgccacaagagcactatgttagaattactggcttatacccaacactcaatatctcagatgagttttctagcaatgttgcaaattatcaaaaggttggtatgcaaaagtattctacactccagggaccacctggtactggtaagagtcattttgctattggcctagctctctactacccttctgctcgcatagtgtatacagcttgctctcatgccgctgttgatgcactatgtgagaaggcattaaaatatttgcctatagataaatgtagtagaattatacctgcacgtgctcgtgtagagtgttttgataaattcaaagtgaattcaacattagaacagtatgtcttttgtactgtaaatgcattgcctgagacgacagcagatatagttgtctttgatgaaatttcaatggccacaaattatgatttgagtgttgtcaatgccagattacgtgctaagcactatgtgtacattggcgaccctgctcaattacctgcaccacgcacattgctaactaagggcacactagaaccagaatatttcaattcagtgtgtagacttatgaaaactataggtccagacatgttcctcggaacttgtcggcgttgtcctgctgaaattgttgacactgtgagtgctttggtttatgataataagcttaaagcacataaagacaaatcagctcaatgctttaaaatgttttataagggtgttatcacgcatgatgtttcatctgcaattaacaggccacaaataggcgtggtaagagaattccttacacgtaaccctgcttggagaaaagctgtctttatttcaccttataattcacagaatgctgtagcctcaaagattttgggactaccaactcaaactgttgattcatcacagggctcagaatatgactatgtcatattcactcaaaccactgaaacagctcactcttgtaatgtaaacagatttaatgttgctattaccagagcaaaagtaggcatactttgcataatgtctgatagagacctttatgacaagttgcaatttacaagtcttgaaattccacgtaggaatgtggcaactttacaagctgaaaatgtaacaggactctttaaagattgtagtaaggtaatcactgggttacatcctacacaggcacctacacacctcagtgttgacactaaattcaaaactgaaggtttatgtgttgacatacctggcatacctaaggacatgacctatagaagactcatctctatgatgggttttaaaatgaattatcaagttaatggttaccctaacatgtttatcacccgcgaagaagctataagacatgtacgtgcatggattggcttcgatgtcgaggggtgtcatgctactagagaagctgttggtaccaatttacctttacagctaggtttttctacaggtgttaacctagttgctgtacctacaggttatgttgatacacctaataatacagatttttccagagttagtgctaaaccaccgcctggagatcaatttaaacacctcataccacttatgtacaaaggacttccttggaatgtagtgcgtataaagattgtacaaatgttaagtgacacacttaaaaatctctctgacagagtcgtatttgtcttatgggcacatggctttgagttgacatctatgaagtattttgtgaaaataggacctgagcgcacctgttgtctatgtgatagacgtgccacatgcttttccactgcttcagacacttatgcctgttggcatcattctattggatttgattacgtctataatccgtttatgattgatgttcaacaatggggttttacaggtaacctacaaagcaaccatgatctgtattgtcaagtccatggtaatgcacatgtagctagttgtgatgcaatcatgactaggtgtctagctgtccacgagtgctttgttaagcgtgttgactggactattgaatatcctataattggtgatgaactgaagattaatgcggcttgtagaaaggttcaacacatggttgttaaagctgcattattagcagacaaattcccagttcttcacgacattggtaaccctaaagctattaagtgtgtacctcaagctgatgtagaatggaagttctatgatgcacagccttgtagtgacaaagcttataaaatagaagaattattctattcttatgccacacattctgacaaattcacagatggtgtatgcctattttggaattgcaatgtcgatagatatcctgctaattccattgtttgtagatttgacactagagtgctatctaaccttaacttgcctggttgtgatggtggcagtttgtatgtaaataaacatgcattccacacaccagcttttgataaaagtgcttttgttaatttaaaacaattaccatttttctattactctgacagtccatgtgagtctcatggaaaacaagtagtgtcagatatagattatgtaccactaaagtctgctacgtgtataacacgttgcaatttaggtggtgctgtctgtagacatcatgctaatgagtacagattgtatctcgatgcttataacatgatgatctcagctggctttagcttgtgggtttacaaacaatttgatacttataacctctggaacacttttacaagacttcagagtttagaaaatgtggcttttaatgttgtaaataagggacactttgatggacaacagggtgaagtaccagtttctatcattaataacactgtttacacaaaagttgatggtgttgatgtagaattgtttgaaaataaaacaacattacctgttaatgtagcatttgagctttgggctaagcgcaacattaaaccagtaccagaggtgaaaatactcaataatttgggtgtggacattgctgctaatactgtgatctgggactacaaaagagatgctccagcacatatatctactattggtgtttgttctatgactgacatagccaagaaaccaactgaaacgatttgtgcaccactcactgtcttttttgatggtagagttgatggtcaagtagacttatttagaaatgcccgtaatggtgttcttattacagaaggtagtgttaaaggtttacaaccatctgtaggtcccaaacaagctagtcttaatggagtcacattaattggagaagccgtaaaaacacagttcaattattataagaaagttgatggtgttgtccaacaattacctgaaacttactttactcagagtagaaatttacaagaatttaaacccaggagtcaaatggaaattgatttcttagaattagctatggatgaattcattgaacggtataaattagaaggctatgccttcgaacatatcgtttatggagattttagtcatagtcagttaggtggtttacatctactgattggactagctaaacgttttaaggaatcaccttttgaattagaagattttattcctatggacagtacagttaaaaactatttcataacagatgcgcaaacaggttcatctaagtgtgtgtgttctgttattgatttattacttgatgattttgttgaaataataaaatcccaagatttatctgtagtttctaaggttgtcaaagtgactattgactatacagaaatttcatttatgctttggtgtaaagatggccatgtagaaacattttacccaaaattacaatctagtcaagcgtggcaaccgggtgttgctatgcctaatctttacaaaatgcaaagaatgctattagaaaagtgtgaccttcaaaattatggtgatagtgcaacattacctaaaggcataatgatgaatgtcgcaaaatatactcaactgtgtcaatatttaaacacattaacattagctgtaccctataatatgagagttatacattttggtgctggttctgataaaggagttgcaccaggtacagctgttttaagacagtggttgcctacgggtacgctgcttgtcgattcagatcttaatgactttgtctctgatgcagattcaactttgattggtgattgtgcaactgtacatacagctaataaatgggatctcattattagtgatatgtacgaccctaagactaaaaatgttacaaaagaaaatgactctaaagagggttttttcacttacatttgtgggtttatacaacaaaagctagctcttggaggttccgtggctataaagataacagaacattcttggaatgctgatctttataagctcatgggacacttcgcatggtggacagcctttgttactaatgtgaatgcgtcatcatctgaagcatttttaattggatgtaattatcttggcaaaccacgcgaacaaatagatggttatgtcatgcatgcaaattacatattttggaggaatacaaatccaattcagttgtcttcctattctttatttgacatgagtaaatttccccttaaattaaggggtactgctgttatgtctttaaaagaaggtcaaatcaatgatatgattttatctcttcttagtaaaggtagacttataattagagaaaacaacagagttgttatttctagtgatgttcttgttaacaacta

SEQ ID NO: 4 - DNA, 3821 bp, Severe acute respiratory syndrome coronavirus 2
atgtttgtttttcttgttttattgccactagtctctagtcagtgtgttaatcttacaaccagaactcaattaccccctgcatacactaattctttcacacgtggtgtttattaccctgacaaagttttcagatcctcagttttacattcaactcaggacttgttcttacctttcttttccaatgttacttggttccatgctatacatgtctctgggaccaatggtactaagaggtttgataaccctgtcctaccatttaatgatggtgtttattttgcttccactgagaagtctaacataataagaggctggatttttggtactactttagattcgaagacccagtccctacttattgttaataacgctactaatgttgttattaaagtctgtgaatttcaattttgtaatgatccatttttgggtgtttattaccacaaaaacaacaaaagttggatggaaagtgagttcagagtttattctagtgcgaataattgcacttttgaatatgtctctcagccttttcttatggaccttgaaggaaaacagggtaatttcaaaaatcttagggaatttgtgtttaagaatattgatggttattttaaaatatattctaagcacacgcctattaatttagtgcgtgatctccctcagggtttttcggctttagaaccattggtagatttgccaataggtattaacatcactaggtttcaaactttacttgctttacatagaagttatttgactcctggtgattcttcttcaggttggacagctggtgctgcagcttattatgtgggttatcttcaacctaggacttttctattaaaatataatgaaaatggaaccattacagatgctgtagactgtgcacttgaccctctctcagaaacaaagtgtacgttgaaatccttcactgtagaaaaaggaatctatcaaacttctaactttagagtccaaccaacagaatctattgttagatttcctaatattacaaacttgtgcccttttggtgaagtttttaacgccaccagatttgcatctgtttatgcttggaacaggaagagaatcagcaactgtgttgctgattattctgtcctatataattccgcatcattttccacttttaagtgttatggagtgtctcctactaaattaaatgatctctgctttactaatgtctatgcagattcatttgtaattagaggtgatgaagtcagacaaatcgctccagggcaaactggaaagattgctgattataattataaattaccagatgattttacaggctgcgttatagcttggaattctaacaatcttgattctaaggttggtggtaattataattacctgtatagattgtttaggaagtctaatctcaaaccttttgagagagatatttcaactgaaatctatcaggccggtagcacaccttgtaatggtgttgaaggttttaattgttactttcctttacaatcatatggtttccaacccactaatggtgttggttaccaaccatacagagtagtagtactttcttttgaacttctacatgcaccagcaactgtttgtggacctaaaaagtctactaatttggttaaaaacaaatgtgtcaatttcaacttcaatggtttaacaggcacaggtgttcttactgagtctaacaaaaagtttctgcctttccaacaatttggcagagacattgctgacactactgatgctgtccgtgatccacagacacttgagattcttgacattacaccatgttcttttggtggtgtcagtgttataacaccaggaacaaatacttctaaccaggttgctgttctttatcaggatgttaactgcacagaagtccctgttgctattcatgcagatcaacttactcctacttggcgtgtttattctacaggttctaatgtttttcaaacacgtgcaggctgtttaataggggctgaacatgtcaacaactcatatgagtgtgacatacccattggtgcaggtatatgcgctagttatcagactcagactaattctcctcggcgggcacgtagtgtagctagtcaatccatcattgcctacactatgtcacttggtgcagaaaattcagttgcttactctaataactctattgccatacccacaaattttactattagtgttaccacagaaattctaccagtgtctatgaccaagacatcagtagattgtacaatgtacatttgtggtgattcaactgaatgcagcaatcttttgttgcaatatggcagtttttgtacacaattaaaccgtgctttaactggaatagctgttgaacaagacaaaaacacccaagaagtttttgcacaagtcaaacaaatttacaaaacaccaccaattaaagattttggtggttttaatttttcacaaatattaccagatccatcaaaaccaagcaagaggtcatttattgaagatctacttttcaacaaagtgacacttgcagatgctggcttcatcaaacaatatggtgattgccttggtgatattgctgctagagacctcatttgtgcacaaaagtttaacggccttactgttttgccacctttgctcacagatgaaatgattgctcaatacacttctgcactgttagcgggtacaatcacttctggttggacctttggtgcaggtgctgcattacaaataccatttgctatgcaaatggcttataggtttaatggtattggagttacacagaatgttctctatgagaaccaaaaattgattgccaaccaatttaatagtgctattggcaaaattcaagactcactttcttccacagcaagtgcacttggaaaacttcaagatgtggtcaaccaaaatgcacaagctttaaacacgcttgttaaacaacttagctccaattttggtgcaatttcaagtgttttaaatgatatcctttcacgtcttgacaaagttgaggctgaagtgcaaattgataggttgatcacaggcagacttcaaagtttgcagacatatgtgactcaacaattaattagagctgcagaaatcagagcttctgctaatcttgctgctactaaaatgtcagagtgtgtacttggacaatcaaaaagagttgatttttgtggaaagggctatcatcttatgtccttccctcagtcagcacctcatggtgtagtcttcttgcatgtgacttatgtccctgcacaagaaaagaacttcacaactgctcctgccatttgtcatgatggaaaagcacactttcctcgtgaaggtgtctttgtttcaaatggcacacactggtttgtaacacaaaggaatttttatgaaccacaaatcattactacagacaacacatttgtgtctggtaactgtgatgttgtaataggaattgtcaacaacacagtttatgatcctttgcaacctgaattagactcattcaaggaggagttagataaatattttaagaatcatacatcaccagatgttgatttaggtgacatctctggcattaatgcttcagttgtaaacattcaaaaagaaattgaccgcctcaatgaggttgccaagaatttaaatgaatctctcatcgatctccaagaacttggaaagtatgagcagtatataaaatggccatggtacatttggctaggttttatagctggcttgattgccatagtaatggtgacaattatgctttgctgtatgaccagttgctgtagttgtctcaagggctgttgttcttgtggatcctgctgcaaatttgatgaagacgactctgagccagtgctcaaaggagtcaaattacattacacata

SEQ ID NO: 5 - DNA, 827 bp, Severe acute respiratory syndrome coronavirus 2
atggatttgtttatgagaatcttcacaattggaactgtaactttgaagcaaggtgaaatcaaggatgctactccttcagattttgttcgcgctactgcaacgataccgatacaagcctcactccctttcggatggcttattgttggcgttgcacttcttgctgtttttcagagcgcttccaaaatcataaccctcaaaaagagatggcaactagcactctccaagggtgttcactttgtttgcaacttgctgttgttgtttgtaacagtttactcacaccttttgctcgttgctgctggccttgaagccccttttctctatctttatgctttagtctacttcttgcagagtataaactttgtaagaataataatgaggctttggctttgctggaaatgccgttccaaaaacccattactttatgatgccaactattttctttgctggcatactaattgttacgactattgtataccttacaatagtgtaacttcttcaattgtcattacttcaggtgatggcacaacaagtcctatttctgaacatgactaccagattggtggttatactgaaaaatgggaatctggagtaaaagactgtgttgtattacacagttacttcacttcagactattaccagctgtactcaactcaattgagtacagacactggtgttgaacatgttaccttcttcatctacaataaaattgttgatgagcctgaagaacatgtccaaattcacacaatcgacggttcatccggagttgttaatccagtaatggaaccaatttatgatgaaccgacgacgactactagcgtgcctttgta

SEQ ID NO: 6 - DNA, 227 bp, Severe acute respiratory syndrome coronavirus 2
atgtactcattcgtttcggaagagacaggtacgttaatagttaatagcgtacttctttttcttgctttcgtggtattcttgctagttacactagccatccttactgcgcttcgattgtgtgcgtactgctgcaatattgttaacgtgagtcttgtaaaaccttctttttacgtttactctcgtgttaaaaatctgaattcttctagagttcctgatcttctggtcta

SEQ ID NO: 7 - DNA, 668 bp, Severe acute respiratory syndrome coronavirus 2
atggcagattccaacggtactattaccgttgaagagcttaaaaagctccttgaacaatggaacctagtaataggtttcctattccttacatggatttgtcttctacaatttgcctatgccaacaggaataggtttttgtatataattaagttaattttcctctggctgttatggccagtaactttagcttgttttgtgcttgctgctgtttacagaataaattggatcaccggtggaattgctatcgcaatggcttgtcttgtaggcttgatgtggctcagctacttcattgcttctttcagactgtttgcgcgtacgcgttccatgtggtcattcaatccagaaactaacattcttctcaacgtgccactccatggcactattctgaccagaccgcttctagaaagtgaactcgtaatcggagctgtgatccttcgtggacatcttcgtattgctggacaccatctaggacgctgtgacatcaaggacctgcctaaagaaatcactgttgctacatcacgaacgctttcttattacaaattgggagcttcgcagcgtgtagcaggtgactcaggttttgctgcatacagtcgctacaggattggcaactataaattaaacacagaccattccagtagcagtgacaatattgctttgcttgtacagta

SEQ ID NO: 8 - DNA, 365 bp, Severe acute respiratory syndrome coronavirus 2
atgaaaattattcttttcttggcactgataacactcgctacttgtgagctttatcactaccaagagtgtgttagaggtacaacagtacttttaaaagaaccttgctcttctggaacatacgagggcaattcaccatttcatcctctagctgataacaaatttgcactgacttgctttagcactcaatttgcttttgcttgtcctgacggcgtaaaacacgtctatcagttacgtgccagatcagtttcacctaaactgttcatcagacaagaggaagttcaagaactttactctccaatttttcttattgttgcggcaatagtgtttataacactttgcttcacactcaaaagaaagacagaatg

SEQ ID NO: 9 - DNA, 365 bp, Severe acute respiratory syndrome coronavirus 2
atgaaatttcttgttttcttaggaatcatcacaactgtagctgcatttcaccaagaatgtagtttacagtcatgtactcaacatcaaccatatgtagttgatgacccgtgtcctattcacttctattctaaatggtatattagagtaggagctagaaaatcagcacctttaattgaattgtgcgtggatgaggctggttctaaatcacccattcagtacatcgatatcggtaattatacagtttcctgtttaccttttacaattaattgccaggaacctaaattgggtagtcttgtagtgcgttgttcgttctatgaagactttttagagtatcatgacgttcgtgttgttttagatttcatcta

SEQ ID NO: 10 - DNA, 1259 bp, Severe acute respiratory syndrome coronavirus 2
atgtctgataatggaccccaaaatcagcgaaatgcaccccgcattacgtttggtggaccctcagattcaactggcagtaaccagaatggagaacgcagtggggcgcgatcaaaacaacgtcggccccaaggtttacccaataatactgcgtcttggttcaccgctctcactcaacatggcaaggaagaccttaaattccctcgaggacaaggcgttccaattaacaccaatagcagtccagatgaccaaattggctactaccgaagagctaccagacgaattcgtggtggtgacggtaaaatgaaagatctcagtccaagatggtatttctactacctaggaactgggccagaagctggacttccctatggtgctaacaaagacggcatcatatgggttgcaactgagggagccttgaatacaccaaaagatcacattggcacccgcaatcctgctaacaatgctgcaatcgtgctacaacttcctcaaggaacaacattgccaaaaggcttctacgcagaagggagcagaggcggcagtcaagcctcttctcgttcctcatcacgtagtcgcaacagttcaagaaattcaactccaggcagcagtaggggaacttctcctgctagaatggctggcaatggcggtgatgctgctcttgctttgctgctgcttgacagattgaaccagcttgagagcaaaatgtctggtaaaggccaacaacaacaaggccaaactgtcactaagaaatctgctgctgaggcttctaagaagcctcggcaaaaacgtactgccactaaagcatacaatgtaacacaagctttcggcagacgtggtccagaacaaacccaaggaaattttggggaccaggaactaatcagacaaggaactgattacaaacattggccgcaaattgcacaatttgcccccagcgcttcagcgttcttcggaatgtcgcgcattggcatggaagtcacaccttcgggaacgtggttgacctacacaggtgccatcaaattggatgacaaagatccaaatttcaaagatcaagtcattttgctgaataagcatattgacgcatacaaaacattcccaccaacagagcctaaaaaggacaaaaagaagaaggctgatgaaactcaagccttaccgcagagacagaagaaacagcaaactgtgactcttcttcctgctgcagatttggatgatttctccaaacaattgcaacaatccatgagcagtgctgactcaactcaggccta

SEQ ID NO: 11 - RNA, 20 nt, Severe acute respiratory syndrome coronavirus 2
gguaacugguaugauuucgg

SEQ ID NO: 12 - RNA, 20 nt, Severe acute respiratory syndrome coronavirus 2
ucugcauugugcaaacuuua

SEQ ID NO: 13 - RNA, 20 nt, Severe acute respiratory syndrome coronavirus 2
ugugauaucagacaacuacu

SEQ ID NO: 14 - RNA, 20 nt, Severe acute respiratory syndrome coronavirus 2
uguagcuugucacaccguuu

SEQ ID NO: 15 - RNA, 20 nt, Severe acute respiratory syndrome coronavirus 2
uaagucaguucuuuauuauc

SEQ ID NO: 16 - RNA, 20 nt, Severe acute respiratory syndrome coronavirus 2
uuugcuauuggccuagcucu

SEQ ID NO: 17 - RNA, 20 nt, Severe acute respiratory syndrome coronavirus 2
ggccacaaauuaugauuuga

SEQ ID NO: 18 - RNA, 20 nt, Severe acute respiratory syndrome coronavirus 2
guggcaacuuuacaagcuga

SEQ ID NO: 19 - RNA, 20 nt, Severe acute respiratory syndrome coronavirus 2
ucugacagagucguauuugu

SEQ ID NO: 20 - RNA, 20 nt, Severe acute respiratory syndrome coronavirus 2
ucuguuauugauuuauuacu

SEQ ID NO: 21 - RNA, 20 nt, Severe acute respiratory syndrome coronavirus 2
ugcaccagguacagcuguuu

SEQ ID NO: 22 - RNA, 20 nt, Severe acute respiratory syndrome coronavirus 2
uuugacaugaguaaauuucc

SEQ ID NO: 23 - RNA, 20 nt, Severe acute respiratory syndrome coronavirus 2
uguggcuuaguagaaguuga

SEQ ID NO: 24 - RNA, 20 nt, Severe acute respiratory syndrome coronavirus 2
ucagacauucuuuaagcuug

SEQ ID NO: 25 - RNA, 20 nt, Severe acute respiratory syndrome coronavirus 2
ugugauaauaucaaauuugc

SEQ ID NO: 26 - RNA, 20 nt, Severe acute respiratory syndrome coronavirus 2
ugaaacaucaaauucguuug

SEQ ID NO: 27 - RNA, 20 nt, Severe acute respiratory syndrome coronavirus 2
accagcaaauaauaguuuaa

SEQ ID NO: 28 - RNA, 20 nt, Severe acute respiratory syndrome coronavirus 2
gcugguaguacauuuauuag

SEQ ID NO: 29 - RNA, 20 nt, Severe acute respiratory syndrome coronavirus 2
uguagaaacuaaagauguug

SEQ ID NO: 30 - RNA, 20 nt, Severe acute respiratory syndrome coronavirus 2
guagaaacuaaagauguugu

SEQ ID NO: 31 - RNA, 20 nt, Severe acute respiratory syndrome coronavirus 2
uuugcuaacaaacaugcuga

SEQ ID NO: 32 - RNA, 20 nt, Severe acute respiratory syndrome coronavirus 2
cuggauaacaauugcuuaua

SEQ ID NO: 33 - RNA, 20 nt, Severe acute respiratory syndrome coronavirus 2
caguguauaaugcuaguuua

SEQ ID NO: 34 - RNA, 20 nt, Severe acute respiratory syndrome coronavirus 2
ccuaaagugaaguauuuaua

SEQ ID NO: 35 - RNA, 20 nt, Severe acute respiratory syndrome coronavirus 2
auuaaagucugugaauuuca

SEQ ID NO: 36 - RNA, 20 nt, Severe acute respiratory syndrome coronavirus 2
ucggcuuuagaaccauuggu

SEQ ID NO: 37 - RNA, 20 nt, Severe acute respiratory syndrome coronavirus 2
ccuaauauuacaaacuugug

SEQ ID NO: 38 - RNA, 20 nt, Severe acute respiratory syndrome coronavirus 2
gauuauaauuauaaauuacc

SEQ ID NO: 39 - RNA, 20 nt, Severe acute respiratory syndrome coronavirus 2
ggugguaauuauaauuaccu

SEQ ID NO: 40 - RNA, 20 nt, Severe acute respiratory syndrome coronavirus 2
ugugucaauuucaacuucaa

SEQ ID NO: 41 - RNA, 20 nt, Severe acute respiratory syndrome coronavirus 2
ucugccuuuccaacaauuug

SEQ ID NO: 42 - RNA, 20 nt, Severe acute respiratory syndrome coronavirus 2
cugccuuuccaacaauuugg

SEQ ID NO: 43 - RNA, 20 nt, Severe acute respiratory syndrome coronavirus 2
uguacaauguacauuugugg

SEQ ID NO: 44 - RNA, 20 nt, Severe acute respiratory syndrome coronavirus 2
ggcuucaucaaacaauaugg

SEQ ID NO: 45 - RNA, 20 nt, Severe acute respiratory syndrome coronavirus 2
uggaguuacacagaauguuc

SEQ ID NO: 46 - RNA, 20 nt, Severe acute respiratory syndrome coronavirus 2
uuacacauaaacgaacuuau

SEQ ID NO: 47 - RNA, 20 nt, Severe acute respiratory syndrome coronavirus 2
cuucacaauuggaacuguaa

SEQ ID NO: 48 - RNA, 20 nt, Severe acute respiratory syndrome coronavirus 2
guuugcaacuugcuguuguu

SEQ ID NO: 49 - RNA, 20 nt, Severe acute respiratory syndrome coronavirus 2
uaugcuuuagucuacuucuu

SEQ ID NO: 50 - RNA, 20 nt, Severe acute respiratory syndrome coronavirus 2
cuugcagaguauaaacuuug

SEQ ID NO: 51 - RNA, 20 nt, Severe acute respiratory syndrome coronavirus 2
ugcagaguauaaacuuugua

SEQ ID NO: 52 - RNA, 20 nt, Severe acute respiratory syndrome coronavirus 2
uaaacuuuguaagaauaaua

SEQ ID NO: 53 - RNA, 20 nt, Severe acute respiratory syndrome coronavirus 2
cuuacaauaguguaacuucu

SEQ ID NO: 54 - RNA, 20 nt, Severe acute respiratory syndrome coronavirus 2
uacaauaguguaacuucuuc

SEQ ID NO: 55 - RNA, 20 nt, Severe acute respiratory syndrome coronavirus 2
cacaacaaguccuauuucug

SEQ ID NO: 56 - RNA, 20 nt, Severe acute respiratory syndrome coronavirus 2
uguuguauuacacaguuacu

SEQ ID NO: 57 - RNA, 20 nt, Severe acute respiratory syndrome coronavirus 2
cagacuauuaccagcuguac

SEQ ID NO: 58 - RNA, 20 nt, Severe acute respiratory syndrome coronavirus 2
uugaacauguuaccuucuuc

SEQ ID NO: 59 - RNA, 20 nt, Severe acute respiratory syndrome coronavirus 2
uuucggaagagacagguacg

SEQ ID NO: 60 - RNA, 20 nt, Severe acute respiratory syndrome coronavirus 2
cggaagagacagguacguua

SEQ ID NO: 61 - RNA, 20 nt, Severe acute respiratory syndrome coronavirus 2
acagguacguuaauaguuaa

SEQ ID NO: 62 - RNA, 20 nt, Severe acute respiratory syndrome coronavirus 2
guuaauaguuaauagcguac

SEQ ID NO: 63 - RNA, 20 nt, Severe acute respiratory syndrome coronavirus 2
cuugcuuucgugguauucuu

SEQ ID NO: 64 - RNA, 20 nt, Severe acute respiratory syndrome coronavirus 2
cgugguauucuugcuaguua

SEQ ID NO: 65 - RNA, 20 nt, Severe acute respiratory syndrome coronavirus 2
acugcugcaauauuguuaac

SEQ ID NO: 66 - RNA, 20 nt, Severe acute respiratory syndrome coronavirus 2
ugcaauauuguuaacgugag

SEQ ID NO: 67 - RNA, 20 nt, Severe acute respiratory syndrome coronavirus 2
ccugaucuucuggucuaaac

SEQ ID NO: 68 - RNA, 20 nt, Severe acute respiratory syndrome coronavirus 2
ucuggucuaaacgaacuaaa

SEQ ID NO: 69 - RNA, 20 nt, Severe acute respiratory syndrome coronavirus 2
gucuaaacgaacuaaauauu

SEQ ID NO: 70 - RNA, 20 nt, Severe acute respiratory syndrome coronavirus 2
uaaacgaacuaaauauuaua

SEQ ID NO: 71 - RNA, 20 nt, Severe acute respiratory syndrome coronavirus 2
ugaacaauggaaccuaguaa

SEQ ID NO: 72 - RNA, 20 nt, Severe acute respiratory syndrome coronavirus 2
ggaaccuaguaauagguuuc

SEQ ID NO: 73 - RNA, 20 nt, Severe acute respiratory syndrome coronavirus 2
uauuccuuacauggauuugu

SEQ ID NO: 74 - RNA, 20 nt, Severe acute respiratory syndrome coronavirus 2
ucuacaauuugccuaugcca

SEQ ID NO: 75 - RNA, 20 nt, Severe acute respiratory syndrome coronavirus 2
uaugccaacaggaauagguu

SEQ ID NO: 76 - RNA, 20 nt, Severe acute respiratory syndrome coronavirus 2
augccaacaggaauagguuu

SEQ ID NO: 77 - RNA, 20 nt, Severe acute respiratory syndrome coronavirus 2
auggccaguaacuuuagcuu

SEQ ID NO: 78 - RNA, 20 nt, Severe acute respiratory syndrome coronavirus 2
ugugcuugcugcuguuuaca

SEQ ID NO: 79 - RNA, 20 nt, Severe acute respiratory syndrome coronavirus 2
gccuaaagaaaucacuguug

SEQ ID NO: 80 - RNA, 20 nt, Severe acute respiratory syndrome coronavirus 2
ugcuacaucacgaacgcuuu

SEQ ID NO: 81 - RNA, 20 nt, Severe acute respiratory syndrome coronavirus 2
uacaucacgaacgcuuucuu

SEQ ID NO: 82 - RNA, 20 nt, Severe acute respiratory syndrome coronavirus 2
auuggcaacuauaaauuaaa

SEQ ID NO: 83 - RNA, 20 nt, Severe acute respiratory syndrome coronavirus 2
aagaguguguuagagguaca

SEQ ID NO: 84 - RNA, 20 nt, Severe acute respiratory syndrome coronavirus 2
uucaccauuucauccucuag

SEQ ID NO: 85 - RNA, 20 nt, Severe acute respiratory syndrome coronavirus 2
ucuagcugauaacaaauuug

SEQ ID NO: 86 - RNA, 20 nt, Severe acute respiratory syndrome coronavirus 2
uuugcacugacuugcuuuag

SEQ ID NO: 87 - RNA, 20 nt, Severe acute respiratory syndrome coronavirus 2
ugcuuuagcacucaauuugc

SEQ ID NO: 88 - RNA, 20 nt, Severe acute respiratory syndrome coronavirus 2
aucaguuucaccuaaacugu

SEQ ID NO: 89 - RNA, 20 nt, Severe acute respiratory syndrome coronavirus 2
ucagacaagaggaaguucaa

SEQ ID NO: 90 - RNA, 20 nt, Severe acute respiratory syndrome coronavirus 2
uucaagaacuuuacucucca

SEQ ID NO: 91 - RNA, 20 nt, Severe acute respiratory syndrome coronavirus 2
ugcggcaauaguguuuauaa

SEQ ID NO: 92 - RNA, 20 nt, Severe acute respiratory syndrome coronavirus 2
guguuuauaacacuuugcuu

SEQ ID NO: 93 - RNA, 20 nt, Severe acute respiratory syndrome coronavirus 2
uauaacacuuugcuucacac

SEQ ID NO: 94 - RNA, 20 nt, Severe acute respiratory syndrome coronavirus 2
acagaaugauugaacuuuca

SEQ ID NO: 95 - RNA, 20 nt, Severe acute respiratory syndrome coronavirus 2
agcugcauuucaccaagaau

SEQ ID NO: 96 - RNA, 20 nt, Severe acute respiratory syndrome coronavirus 2
uucaccaagaauguaguuua

SEQ ID NO: 97 - RNA, 20 nt, Severe acute respiratory syndrome coronavirus 2
uguaguugaugacccguguc

SEQ ID NO: 98 - RNA, 20 nt, Severe acute respiratory syndrome coronavirus 2
uguccuauucacuucuauuc

SEQ ID NO: 99 - RNA, 20 nt, Severe acute respiratory syndrome coronavirus 2
aaugguauauuagaguagga

SEQ ID NO: 100 - RNA, 20 nt, Severe acute respiratory syndrome coronavirus 2
uucuaaaucacccauucagu

SEQ ID NO: 101 - RNA, 20 nt, Severe acute respiratory syndrome coronavirus 2
aucgguaauuauacaguuuc

SEQ ID NO: 102 - RNA, 20 nt, Severe acute respiratory syndrome coronavirus 2
uuauacaguuuccuguuuac

SEQ ID NO: 103 - RNA, 20 nt, Severe acute respiratory syndrome coronavirus 2
uauacaguuuccuguuuacc

SEQ ID NO: 104 - RNA, 20 nt, Severe acute respiratory syndrome coronavirus 2
ccaggaaccuaaauugggua

SEQ ID NO: 105 - RNA, 20 nt, Severe acute respiratory syndrome coronavirus 2
uuagaguaucaugacguucg

SEQ ID NO: 106 - RNA, 20 nt, Severe acute respiratory syndrome coronavirus 2
aguaucaugacguucguguu

SEQ ID NO: 107 - RNA, 20 nt, Severe acute respiratory syndrome coronavirus 2
uacccaauaauacugcgucu

SEQ ID NO: 108 - RNA, 20 nt, Severe acute respiratory syndrome coronavirus 2
gacggcaucauauggguugc

SEQ ID NO: 109 - RNA, 20 nt, Severe acute respiratory syndrome coronavirus 2
ugacagauugaaccagcuug

SEQ ID NO: 110 - RNA, 20 nt, Severe acute respiratory syndrome coronavirus 2
aacaacaaggccaaacuguc

SEQ ID NO: 111 - RNA, 20 nt, Severe acute respiratory syndrome coronavirus 2
gaacuaaucagacaaggaac

SEQ ID NO: 112 - RNA, 20 nt, Severe acute respiratory syndrome coronavirus 2
ggugccaucaaauuggauga

SEQ ID NO: 113 - RNA, 20 nt, Severe acute respiratory syndrome coronavirus 2
augacaaagauccaaauuuc

SEQ ID NO: 114 - RNA, 20 nt, Severe acute respiratory syndrome coronavirus 2
ugacaaagauccaaauuuca

SEQ ID NO: 115 - RNA, 20 nt, Severe acute respiratory syndrome coronavirus 2
ccaaauuucaaagaucaagu

SEQ ID NO: 116 - RNA, 20 nt, Severe acute respiratory syndrome coronavirus 2
auuucaaagaucaagucauu

SEQ ID NO: 117 - RNA, 20 nt, Severe acute respiratory syndrome coronavirus 2
ugcugaauaagcauauugac

SEQ ID NO: 118 - RNA, 20 nt, Severe acute respiratory syndrome coronavirus 2
ugcagauuuggaugauuucu

SEQ ID NO: 119 - DNA, 45 bp, Severe acute respiratory syndrome coronavirus 2
aatcaagatctcaatggtaactggtatgatttcggtgatttcata

SEQ ID NO: 120 - DNA, 45 bp, Severe acute respiratory syndrome coronavirus 2
ggatgacagatgcattctgcattgtgcaaactttaatgttttatt

SEQ ID NO: 121 - DNA, 45 bp, Severe acute respiratory syndrome coronavirus 2
aatctaccaacaatgtgtgatatcagacaactactatttgtagtt

SEQ ID NO: 122 - DNA, 45 bp, Severe acute respiratory syndrome coronavirus 2
aaacatacaacgtgttgtagcttgtcacaccgtttctatagatta

SEQ ID NO: 123 - DNA, 45 bp, Severe acute respiratory syndrome coronavirus 2
tagcataaagaactttaagtcagttctttattatcaaaacaatgt

SEQ ID NO: 124 - DNA, 45 bp, Severe acute respiratory syndrome coronavirus 2
actggtaagagtcattttgctattggcctagctctctactaccct

SEQ ID NO: 125 - DNA, 45 bp, Severe acute respiratory syndrome coronavirus 2
tgatgaaatttcaatggccacaaattatgatttgagtgttgtcaa

SEQ ID NO: 126 - DNA, 45 bp, Severe acute respiratory syndrome coronavirus 2
attccacgtaggaatgtggcaactttacaagctgaaaatgtaaca

SEQ ID NO: 127 - DNA, 45 bp, Severe acute respiratory syndrome coronavirus 2
acacttaaaaatctctctgacagagtcgtatttgtcttatgggca

SEQ ID NO: 128 - DNA, 45 bp, Severe acute respiratory syndrome coronavirus 2
tctaagtgtgtgtgttctgttattgatttattacttgatgatttt

SEQ ID NO: 129 - DNA, 45 bp, Severe acute respiratory syndrome coronavirus 2
ttctgataaaggagttgcaccaggtacagctgttttaagacagtg

SEQ ID NO: 130 - DNA, 45 bp, Severe acute respiratory syndrome coronavirus 2
tcttcctattctttatttgacatgagtaaatttccccttaaatta

SEQ ID NO: 131 - DNA, 45 bp, Severe acute respiratory syndrome coronavirus 2
cttaaagatggcacttgtggcttagtagaagttgaaaaaggcgtt

SEQ ID NO: 132 - DNA, 45 bp, Severe acute respiratory syndrome coronavirus 2
aattaaggagagtgttcagacattctttaagcttgtaaataaatt

SEQ ID NO: 133 - DNA, 45 bp, Severe acute respiratory syndrome coronavirus 2
aattttaagtttgtatgtgataatatcaaatttgctgatgattta

SEQ ID NO: 134 - DNA, 45 bp, Severe acute respiratory syndrome coronavirus 2
gagcacaaaaccagttgaaacatcaaattcgtttgatgtactgaa

SEQ ID NO: 135 - DNA, 45 bp, Severe acute respiratory syndrome coronavirus 2
agacattatacttaaaccagcaaataatagtttaaaaattacaga

SEQ ID NO: 136 - DNA, 45 bp, Severe acute respiratory syndrome coronavirus 2
tgtgatacattctgtgctggtagtacatttattagtgatgaagtt

SEQ ID NO: 137 - DNA, 45 bp, Severe acute respiratory syndrome coronavirus 2
gtttgttgattcagatgtagaaactaaagatgttgttgaatgtct

SEQ ID NO: 138 - DNA, 45 bp, Severe acute respiratory syndrome coronavirus 2
tttgttgattcagatgtagaaactaaagatgttgttgaatgtctt

SEQ ID NO: 139 - DNA, 45 bp, Severe acute respiratory syndrome coronavirus 2
tctacagatacttgttttgctaacaaacatgctgattttgacaca

SEQ ID NO: 140 - DNA, 45 bp, Severe acute respiratory syndrome coronavirus 2
acctttagtacctttctggataacaattgcttatatcatttgtat

SEQ ID NO: 141 - DNA, 45 bp, Severe acute respiratory syndrome coronavirus 2
actggtaatacacttcagtgtataatgctagtttattgtttctta

SEQ ID NO: 142 - DNA, 45 bp, Severe acute respiratory syndrome coronavirus 2
gacacacctaaaggtcctaaagtgaagtatttatactttattaaa

SEQ ID NO: 143 - DNA, 45 bp, Severe acute respiratory syndrome coronavirus 2
gctactaatgttgttattaaagtctgtgaatttcaattttgtaat

SEQ ID NO: 144 - DNA, 45 bp, Severe acute respiratory syndrome coronavirus 2
ctccctcagggtttttcggctttagaaccattggtagatttgcca

SEQ ID NO: 145 - DNA, 45 bp, Severe acute respiratory syndrome coronavirus 2
tctattgttagatttcctaatattacaaacttgtgcccttttggt

SEQ ID NO: 146 - DNA, 45 bp, Severe acute respiratory syndrome coronavirus 2
actggaaagattgctgattataattataaattaccagatgatttt

SEQ ID NO: 147 - DNA, 45 bp, Severe acute respiratory syndrome coronavirus 2
cttgattctaaggttggtggtaattataattacctgtatagattg

SEQ ID NO: 148 - DNA, 45 bp, Severe acute respiratory syndrome coronavirus 2
ttggttaaaaacaaatgtgtcaatttcaacttcaatggtttaaca

SEQ ID NO: 149 - DNA, 45 bp, Severe acute respiratory syndrome coronavirus 2
gtctaacaaaaagtttctgcctttccaacaatttggcagagacat

SEQ ID NO: 150 - DNA, 45 bp, Severe acute respiratory syndrome coronavirus 2
tctaacaaaaagtttctgcctttccaacaatttggcagagacatt

SEQ ID NO: 151 - DNA, 45 bp, Severe acute respiratory syndrome coronavirus 2
aagacatcagtagattgtacaatgtacatttgtggtgattcaact

SEQ ID NO: 152 - DNA, 45 bp, Severe acute respiratory syndrome coronavirus 2
acacttgcagatgctggcttcatcaaacaatatggtgattgcctt

SEQ ID NO: 153 - DNA, 45 bp, Severe acute respiratory syndrome coronavirus 2
taggtttaatggtattggagttacacagaatgttctctatgagaa

SEQ ID NO: 154 - DNA, 45 bp, Severe acute respiratory syndrome coronavirus 2
aggagtcaaattacattacacataaacgaacttatggatttgttt

SEQ ID NO: 155 - DNA, 45 bp, Severe acute respiratory syndrome coronavirus 2
tttgtttatgagaatcttcacaattggaactgtaactttgaagca

SEQ ID NO: 156 - DNA, 45 bp, Severe acute respiratory syndrome coronavirus 2
aagggtgttcactttgtttgcaacttgctgttgttgtttgtaaca

SEQ ID NO: 157 - DNA, 45 bp, Severe acute respiratory syndrome coronavirus 2
ccttttctctatctttatgctttagtctacttcttgcagagtata

SEQ ID NO: 158 - DNA, 45 bp, Severe acute respiratory syndrome coronavirus 2
tgctttagtctacttcttgcagagtataaactttgtaagaataat

SEQ ID NO: 159 - DNA, 45 bp, Severe acute respiratory syndrome coronavirus 2
ctttagtctacttcttgcagagtataaactttgtaagaataataa

SEQ ID NO: 160 - DNA, 45 bp, Severe acute respiratory syndrome coronavirus 2
acttcttgcagagtataaactttgtaagaataataatgaggcttt

SEQ ID NO: 161 - DNA, 45 bp, Severe acute respiratory syndrome coronavirus 2
acgactattgtataccttacaatagtgtaacttcttcaattgtca

SEQ ID NO: 162 - DNA, 45 bp, Severe acute respiratory syndrome coronavirus 2
gactattgtataccttacaatagtgtaacttcttcaattgtcatt

SEQ ID NO: 163 - DNA, 45 bp, Severe acute respiratory syndrome coronavirus 2
tacttcaggtgatggcacaacaagtcctatttctgaacatgacta

SEQ ID NO: 164 - DNA, 45 bp, Severe acute respiratory syndrome coronavirus 2
tggagtaaaagactgtgttgtattacacagttacttcacttcaga

SEQ ID NO: 165 - DNA, 45 bp, Severe acute respiratory syndrome coronavirus 2
acagttacttcacttcagactattaccagctgtactcaactcaat

SEQ ID NO: 166 - DNA, 45 bp, Severe acute respiratory syndrome coronavirus 2
gtacagacactggtgttgaacatgttaccttcttcatctacaata

SEQ ID NO: 167 - DNA, 45 bp, Severe acute respiratory syndrome coronavirus 2
ttatgtactcattcgtttcggaagagacaggtacgttaatagtta

SEQ ID NO: 168 - DNA, 45 bp, Severe acute respiratory syndrome coronavirus 2
tgtactcattcgtttcggaagagacaggtacgttaatagttaata

SEQ ID NO: 169 - DNA, 45 bp, Severe acute respiratory syndrome coronavirus 2
ttcgtttcggaagagacaggtacgttaatagttaatagcgtactt

SEQ ID NO: 170 - DNA, 45 bp, Severe acute respiratory syndrome coronavirus 2
ggaagagacaggtacgttaatagttaatagcgtacttctttttct

SEQ ID NO: 171 - DNA, 45 bp, Severe acute respiratory syndrome coronavirus 2
agcgtacttctttttcttgctttcgtggtattcttgctagttaca

SEQ ID NO: 172 - DNA, 45 bp, Severe acute respiratory syndrome coronavirus 2
tctttttcttgctttcgtggtattcttgctagttacactagccat

SEQ ID NO: 173 - DNA, 45 bp, Severe acute respiratory syndrome coronavirus 2
ttcgattgtgtgcgtactgctgcaatattgttaacgtgagtcttg

SEQ ID NO: 174 - DNA, 45 bp, Severe acute respiratory syndrome coronavirus 2
ttgtgtgcgtactgctgcaatattgttaacgtgagtcttgtaaaa

SEQ ID NO: 175 - DNA, 45 bp, Severe acute respiratory syndrome coronavirus 2
aattcttctagagttcctgatcttctggtctaaacgaactaaata

SEQ ID NO: 176 - DNA, 45 bp, Severe acute respiratory syndrome coronavirus 2
tagagttcctgatcttctggtctaaacgaactaaatattatatta

SEQ ID NO: 177 - DNA, 45 bp, Severe acute respiratory syndrome coronavirus 2
gttcctgatcttctggtctaaacgaactaaatattatattagttt

SEQ ID NO: 178 - DNA, 45 bp, Severe acute respiratory syndrome coronavirus 2
cctgatcttctggtctaaacgaactaaatattatattagtttttc

SEQ ID NO: 179 - DNA, 45 bp, Severe acute respiratory syndrome coronavirus 2
gcttaaaaagctccttgaacaatggaacctagtaataggtttcct

SEQ ID NO: 180 - DNA, 45 bp, Severe acute respiratory syndrome coronavirus 2
agctccttgaacaatggaacctagtaataggtttcctattcctta

SEQ ID NO: 181 - DNA, 45 bp, Severe acute respiratory syndrome coronavirus 2
tagtaataggtttcctattccttacatggatttgtcttctacaat

SEQ ID NO: 182 - DNA, 45 bp, Severe acute respiratory syndrome coronavirus 2
tacatggatttgtcttctacaatttgcctatgccaacaggaatag

SEQ ID NO: 183 - DNA, 45 bp, Severe acute respiratory syndrome coronavirus 2
cttctacaatttgcctatgccaacaggaataggtttttgtatata

SEQ ID NO: 184 - DNA, 45 bp, Severe acute respiratory syndrome coronavirus 2
ttctacaatttgcctatgccaacaggaataggtttttgtatataa

SEQ ID NO: 185 - DNA, 45 bp, Severe acute respiratory syndrome coronavirus 2
tttcctctggctgttatggccagtaactttagcttgttttgtgct

SEQ ID NO: 186 - DNA, 45 bp, Severe acute respiratory syndrome coronavirus 2
aactttagcttgttttgtgcttgctgctgtttacagaataaattg

SEQ ID NO: 187 - DNA, 45 bp, Severe acute respiratory syndrome coronavirus 2
tgacatcaaggacctgcctaaagaaatcactgttgctacatcacg

SEQ ID NO: 188 - DNA, 45 bp, Severe acute respiratory syndrome coronavirus 2
taaagaaatcactgttgctacatcacgaacgctttcttattacaa

SEQ ID NO: 189 - DNA, 45 bp, Severe acute respiratory syndrome coronavirus 2
agaaatcactgttgctacatcacgaacgctttcttattacaaatt

SEQ ID NO: 190 - DNA, 45 bp, Severe acute respiratory syndrome coronavirus 2
tacagtcgctacaggattggcaactataaattaaacacagaccat

SEQ ID NO: 191 - DNA, 45 bp, Severe acute respiratory syndrome coronavirus 2
agctttatcactaccaagagtgtgttagaggtacaacagtacttt

SEQ ID NO: 192 - DNA, 45 bp, Severe acute respiratory syndrome coronavirus 2
aacatacgagggcaattcaccatttcatcctctagctgataacaa

SEQ ID NO: 193 - DNA, 45 bp, Severe acute respiratory syndrome coronavirus 2
ttcaccatttcatcctctagctgataacaaatttgcactgacttg

SEQ ID NO: 194 - DNA, 45 bp, Severe acute respiratory syndrome coronavirus 2
ctagctgataacaaatttgcactgacttgctttagcactcaattt

SEQ ID NO: 195 - DNA, 45 bp, Severe acute respiratory syndrome coronavirus 2
aaatttgcactgacttgctttagcactcaatttgcttttgcttgt

SEQ ID NO: 196 - DNA, 45 bp, Severe acute respiratory syndrome coronavirus 2
tcagttacgtgccagatcagtttcacctaaactgttcatcagaca

SEQ ID NO: 197 - DNA, 45 bp, Severe acute respiratory syndrome coronavirus 2
cacctaaactgttcatcagacaagaggaagttcaagaactttact

SEQ ID NO: 198 - DNA, 45 bp, Severe acute respiratory syndrome coronavirus 2
tcagacaagaggaagttcaagaactttactctccaatttttctta

SEQ ID NO: 199 - DNA, 45 bp, Severe acute respiratory syndrome coronavirus 2
aatttttcttattgttgcggcaatagtgtttataacactttgctt

SEQ ID NO: 200 - DNA, 45 bp, Severe acute respiratory syndrome coronavirus 2
attgttgcggcaatagtgtttataacactttgcttcacactcaaa

SEQ ID NO: 201 - DNA, 45 bp, Severe acute respiratory syndrome coronavirus 2
tgcggcaatagtgtttataacactttgcttcacactcaaaagaaa

SEQ ID NO: 202 - DNA, 45 bp, Severe acute respiratory syndrome coronavirus 2
acactcaaaagaaagacagaatgattgaactttcattaattgact

SEQ ID NO: 203 - DNA, 45 bp, Severe acute respiratory syndrome coronavirus 2
aatcatcacaactgtagctgcatttcaccaagaatgtagtttaca

SEQ ID NO: 204 - DNA, 45 bp, Severe acute respiratory syndrome coronavirus 2
caactgtagctgcatttcaccaagaatgtagtttacagtcatgta

SEQ ID NO: 205 - DNA, 45 bp, Severe acute respiratory syndrome coronavirus 2
tcaacatcaaccatatgtagttgatgacccgtgtcctattcactt

SEQ ID NO: 206 - DNA, 45 bp, Severe acute respiratory syndrome coronavirus 2
gtagttgatgacccgtgtcctattcacttctattctaaatggtat

SEQ ID NO: 207 - DNA, 45 bp, Severe acute respiratory syndrome coronavirus 2
ttcacttctattctaaatggtatattagagtaggagctagaaaat

SEQ ID NO: 208 - DNA, 45 bp, Severe acute respiratory syndrome coronavirus 2
cgtggatgaggctggttctaaatcacccattcagtacatcgatat

SEQ ID NO: 209 - DNA, 45 bp, Severe acute respiratory syndrome coronavirus 2
attcagtacatcgatatcggtaattatacagtttcctgtttacct

SEQ ID NO: 210 - DNA, 45 bp, Severe acute respiratory syndrome coronavirus 2
catcgatatcggtaattatacagtttcctgtttaccttttacaat

SEQ ID NO: 211 - DNA, 45 bp, Severe acute respiratory syndrome coronavirus 2
atcgatatcggtaattatacagtttcctgtttaccttttacaatt

SEQ ID NO: 212 - DNA, 45 bp, Severe acute respiratory syndrome coronavirus 2
ttttacaattaattgccaggaacctaaattgggtagtcttgtagt

SEQ ID NO: 213 - DNA, 45 bp, Severe acute respiratory syndrome coronavirus 2
ttctatgaagactttttagagtatcatgacgttcgtgttgtttta

SEQ ID NO: 214 - DNA, 45 bp, Severe acute respiratory syndrome coronavirus 2
atgaagactttttagagtatcatgacgttcgtgttgttttagatt

SEQ ID NO: 215 - DNA, 45 bp, Severe acute respiratory syndrome coronavirus 2
gtcggccccaaggtttacccaataatactgcgtcttggttcaccg

SEQ ID NO: 216 - DNA, 45 bp, Severe acute respiratory syndrome coronavirus 2
tatggtgctaacaaagacggcatcatatgggttgcaactgaggga

SEQ ID NO: 217 - DNA, 45 bp, Severe acute respiratory syndrome coronavirus 2
tgctttgctgctgcttgacagattgaaccagcttgagagcaaaat

SEQ ID NO: 218 - DNA, 45 bp, Severe acute respiratory syndrome coronavirus 2
ctggtaaaggccaacaacaacaaggccaaactgtcactaagaaat

SEQ ID NO: 219 - DNA, 45 bp, Severe acute respiratory syndrome coronavirus 2
aattttggggaccaggaactaatcagacaaggaactgattacaaa

SEQ ID NO: 220 - DNA, 45 bp, Severe acute respiratory syndrome coronavirus 2
tggttgacctacacaggtgccatcaaattggatgacaaagatcca

SEQ ID NO: 221 - DNA, 45 bp, Severe acute respiratory syndrome coronavirus 2
gtgccatcaaattggatgacaaagatccaaatttcaaagatcaag

SEQ ID NO: 222 - DNA, 45 bp, Severe acute respiratory syndrome coronavirus 2
tgccatcaaattggatgacaaagatccaaatttcaaagatcaagt

SEQ ID NO: 223 - DNA, 45 bp, Severe acute respiratory syndrome coronavirus 2
ttggatgacaaagatccaaatttcaaagatcaagtcattttgctg

SEQ ID NO: 224 - DNA, 45 bp, Severe acute respiratory syndrome coronavirus 2
atgacaaagatccaaatttcaaagatcaagtcattttgctgaata

SEQ ID NO: 225 - DNA, 45 bp, Severe acute respiratory syndrome coronavirus 2
aagatcaagtcattttgctgaataagcatattgacgcatacaaaa

SEQ ID NO: 226 - DNA, 45 bp, Severe acute respiratory syndrome coronavirus 2
gactcttcttcctgctgcagatttggatgatttctccaaacaatt

SEQ ID NO: 227 - RNA, 21 nt, Artificial Sequence
  Description of Artificial Sequence: Synthetic oligonucleotide
uaacaugaauacuuggcuuuu

SEQ ID NO: 228 - RNA, 15 nt, Artificial Sequence
  Description of Artificial Sequence: Synthetic oligonucleotide
aucauaccaguuaca

SEQ ID NO: 229 - RNA, 16 nt, Artificial Sequence
  Description of Artificial Sequence: Synthetic oligonucleotide
guuugcacaaugcaga

SEQ ID NO: 230 - RNA, 15 nt, Artificial Sequence
  Description of Artificial Sequence: Synthetic oligonucleotide
uuugcacaaugcaga

SEQ ID NO: 231 - RNA, 15 nt, Artificial Sequence
  Description of Artificial Sequence: Synthetic oligonucleotide
gugugacaagcuaca

SEQ ID NO: 232 - RNA, 15 nt, Artificial Sequence
  Description of Artificial Sequence: Synthetic oligonucleotide
uaaagaacugacuua

SEQ ID NO: 233 - RNA, 15 nt, Artificial Sequence
  Description of Artificial Sequence: Synthetic oligonucleotide
uaggccaauagcaaa

SEQ ID NO: 234 - RNA, 15 nt, Artificial Sequence
  Description of Artificial Sequence: Synthetic oligonucleotide
ucauaauuuguggca

SEQ ID NO: 235 - RNA, 15 nt, Artificial Sequence
  Description of Artificial Sequence: Synthetic oligonucleotide
uuguaaaguugccaa

SEQ ID NO: 236 - RNA, 15 nt, Artificial Sequence
  Description of Artificial Sequence: Synthetic oligonucleotide
uacgacucugucaga

SEQ ID NO: 237 - RNA, 15 nt, Artificial Sequence
  Description of Artificial Sequence: Synthetic oligonucleotide
uaaaucaauaacaga

SEQ ID NO: 238 - RNA, 15 nt, Artificial Sequence
  Description of Artificial Sequence: Synthetic oligonucleotide
gcuguaccuggugca

SEQ ID NO: 239 - RNA, 15 nt, Artificial Sequence
  Description of Artificial Sequence: Synthetic oligonucleotide
uuuacucaugucaaa

SEQ ID NO: 240 - RNA, 15 nt, Artificial Sequence
  Description of Artificial Sequence: Synthetic oligonucleotide
uucuacuaagccaca

SEQ ID NO: 241 - RNA, 15 nt, Artificial Sequence
  Description of Artificial Sequence: Synthetic oligonucleotide
uuaaagaaugucuga

SEQ ID NO: 242 - RNA, 15 nt, Artificial Sequence
  Description of Artificial Sequence: Synthetic oligonucleotide
uuugauauuaucaca

SEQ ID NO: 243 - RNA, 15 nt, Artificial Sequence
  Description of Artificial Sequence: Synthetic oligonucleotide
gaauuugauguuuca

SEQ ID NO: 244 - RNA, 15 nt, Artificial Sequence
  Description of Artificial Sequence: Synthetic oligonucleotide
cuauuauuugcugga

SEQ ID NO: 245 - RNA, 15 nt, Artificial Sequence
  Description of Artificial Sequence: Synthetic oligonucleotide
aaauguacuaccaga

SEQ ID NO: 246 - RNA, 15 nt, Artificial Sequence
  Description of Artificial Sequence: Synthetic oligonucleotide
ucuuuaguuucuaca

SEQ ID NO: 247 - RNA, 15 nt, Artificial Sequence
  Description of Artificial Sequence: Synthetic oligonucleotide
aucuuuaguuucuaa

SEQ ID NO: 248 - RNA, 15 nt, Artificial Sequence
  Description of Artificial Sequence: Synthetic oligonucleotide
auguuuguuagcaaa

SEQ ID NO: 249 - RNA, 15 nt, Artificial Sequence
  Description of Artificial Sequence: Synthetic oligonucleotide
gcaauuguuauccaa

SEQ ID NO: 250 - RNA, 15 nt, Artificial Sequence
  Description of Artificial Sequence: Synthetic oligonucleotide
uagcauuauacacua

SEQ ID NO: 251 - RNA, 15 nt, Artificial Sequence
  Description of Artificial Sequence: Synthetic oligonucleotide
auacuucacuuuaga

SEQ ID NO: 252 - RNA, 15 nt, Artificial Sequence
  Description of Artificial Sequence: Synthetic oligonucleotide
uucacagacuuuaaa

SEQ ID NO: 253 - RNA, 15 nt, Artificial Sequence
  Description of Artificial Sequence: Synthetic oligonucleotide
ugguucuaaagccga

SEQ ID NO: 254 - RNA, 15 nt, Artificial Sequence
  Description of Artificial Sequence: Synthetic oligonucleotide
guuuguaauauuaga

SEQ ID NO: 255 - RNA, 15 nt, Artificial Sequence
  Description of Artificial Sequence: Synthetic oligonucleotide
uuuauaauuauaaua

SEQ ID NO: 256 - RNA, 15 nt, Artificial Sequence
  Description of Artificial Sequence: Synthetic oligonucleotide
auuauaauuaccaca

SEQ ID NO: 257 - RNA, 15 nt, Artificial Sequence
  Description of Artificial Sequence: Synthetic oligonucleotide
guugaaauugacaca

SEQ ID NO: 258 - RNA, 15 nt, Artificial Sequence
  Description of Artificial Sequence: Synthetic oligonucleotide
uguuggaaaggcaga

SEQ ID NO: 259 - RNA, 15 nt, Artificial Sequence
  Description of Artificial Sequence: Synthetic oligonucleotide
uuguuggaaaggcaa

SEQ ID NO: 260 - RNA, 15 nt, Artificial Sequence
  Description of Artificial Sequence: Synthetic oligonucleotide
aauguacauuguaca

SEQ ID NO: 261 - RNA, 15 nt, Artificial Sequence
  Description of Artificial Sequence: Synthetic oligonucleotide
uuguuugaugaagca

SEQ ID NO: 262 - RNA, 15 nt, Artificial Sequence
  Description of Artificial Sequence: Synthetic oligonucleotide
uucuguguaacucca

SEQ ID NO: 263 - RNA, 15 nt, Artificial Sequence
  Description of Artificial Sequence: Synthetic oligonucleotide
uucguuuauguguaa

SEQ ID NO: 264 - RNA, 15 nt, Artificial Sequence
  Description of Artificial Sequence: Synthetic oligonucleotide
guuccaauugugaaa

SEQ ID NO: 265 - RNA, 15 nt, Artificial Sequence
  Description of Artificial Sequence: Synthetic oligonucleotide
cagcaaguugcaaaa

SEQ ID NO: 266 - RNA, 15 nt, Artificial Sequence
  Description of Artificial Sequence: Synthetic oligonucleotide
guagacuaaagcaua

SEQ ID NO: 267 - RNA, 15 nt, Artificial Sequence
  Description of Artificial Sequence: Synthetic oligonucleotide
uuuauacucugcaaa

SEQ ID NO: 268 - RNA, 15 nt, Artificial Sequence
  Description of Artificial Sequence: Synthetic oligonucleotide
aguuuauacucugca

SEQ ID NO: 269 - RNA, 15 nt, Artificial Sequence
  Description of Artificial Sequence: Synthetic oligonucleotide
uucuuacaaaguuua

SEQ ID NO: 270 - RNA, 15 nt, Artificial Sequence
  Description of Artificial Sequence: Synthetic oligonucleotide
uuacacuauuguaaa

SEQ ID NO: 271 - RNA, 15 nt, Artificial Sequence
  Description of Artificial Sequence: Synthetic oligonucleotide
aguuacacuauugua

SEQ ID NO: 272 - RNA, 15 nt, Artificial Sequence
  Description of Artificial Sequence: Synthetic oligonucleotide
auaggacuuguugua

SEQ ID NO: 273 - RNA, 15 nt, Artificial Sequence
  Description of Artificial Sequence: Synthetic oligonucleotide
cuguguaauacaaca

SEQ ID NO: 274 - RNA, 15 nt, Artificial Sequence
  Description of Artificial Sequence: Synthetic oligonucleotide
gcugguaauagucua

SEQ ID NO: 275 - RNA, 15 nt, Artificial Sequence
  Description of Artificial Sequence: Synthetic oligonucleotide
agguaacauguucaa

SEQ ID NO: 276 - RNA, 15 nt, Artificial Sequence
  Description of Artificial Sequence: Synthetic oligonucleotide
cugucucuuccgaaa

SEQ ID NO: 277 - RNA, 15 nt, Artificial Sequence
  Description of Artificial Sequence: Synthetic oligonucleotide
uaccugucucuucca

SEQ ID NO: 278 - RNA, 15 nt, Artificial Sequence
  Description of Artificial Sequence: Synthetic oligonucleotide
uauuaacguaccuga

SEQ ID NO: 279 - RNA, 15 nt, Artificial Sequence
  Description of Artificial Sequence: Synthetic oligonucleotide
cuauuaacuauuaaa

SEQ ID NO: 280 - RNA, 15 nt, Artificial Sequence
  Description of Artificial Sequence: Synthetic oligonucleotide
uaccacgaaagcaaa

SEQ ID NO: 281 - RNA, 15 nt, Artificial Sequence
  Description of Artificial Sequence: Synthetic oligonucleotide
agcaagaauaccaca

SEQ ID NO: 282 - RNA, 15 nt, Artificial Sequence
  Description of Artificial Sequence: Synthetic oligonucleotide
caauauugcagcaga

SEQ ID NO: 283 - RNA, 15 nt, Artificial Sequence
  Description of Artificial Sequence: Synthetic oligonucleotide
guuaacaauauugca

SEQ ID NO: 284 - RNA, 15 nt, Artificial Sequence
  Description of Artificial Sequence: Synthetic oligonucleotide
gaccagaagaucaga

SEQ ID NO: 285 - RNA, 15 nt, Artificial Sequence
  Description of Artificial Sequence: Synthetic oligonucleotide
uucguuuagaccaga

SEQ ID NO: 286 - RNA, 15 nt, Artificial Sequence
  Description of Artificial Sequence: Synthetic oligonucleotide
uuaguucguuuagaa

SEQ ID NO: 287 - RNA, 15 nt, Artificial Sequence
  Description of Artificial Sequence: Synthetic oligonucleotide
uauuuaguucguuua

SEQ ID NO: 288 - RNA, 15 nt, Artificial Sequence
  Description of Artificial Sequence: Synthetic oligonucleotide
agguuccauuguuca

SEQ ID NO: 289 - RNA, 15 nt, Artificial Sequence
  Description of Artificial Sequence: Synthetic oligonucleotide
cuauuacuagguuca

SEQ ID NO: 290 - RNA, 15 nt, Artificial Sequence
  Description of Artificial Sequence: Synthetic oligonucleotide
uccauguaaggaaua

SEQ ID NO: 291 - RNA, 15 nt, Artificial Sequence
  Description of Artificial Sequence: Synthetic oligonucleotide
uaggcaaauuguaga

SEQ ID NO: 292 - RNA, 15 nt, Artificial Sequence
  Description of Artificial Sequence: Synthetic oligonucleotide
auuccuguuggcaua

SEQ ID NO: 293 - RNA, 15 nt, Artificial Sequence
  Description of Artificial Sequence: Synthetic oligonucleotide
uauuccuguuggcaa

SEQ ID NO: 294 - RNA, 15 nt, Artificial Sequence
  Description of Artificial Sequence: Synthetic oligonucleotide
aaaguuacuggccaa

SEQ ID NO: 295 - RNA, 15 nt, Artificial Sequence
  Description of Artificial Sequence: Synthetic oligonucleotide
acagcagcaagcaca

SEQ ID NO: 296 - RNA, 15 nt, Artificial Sequence
  Description of Artificial Sequence: Synthetic oligonucleotide
gugauuucuuuagga

SEQ ID NO: 297 - RNA, 15 nt, Artificial Sequence
  Description of Artificial Sequence: Synthetic oligonucleotide
guucgugauguagca

SEQ ID NO: 298 - RNA, 15 nt, Artificial Sequence
  Description of Artificial Sequence: Synthetic oligonucleotide
agcguucgugaugua

SEQ ID NO: 299 - RNA, 15 nt, Artificial Sequence
  Description of Artificial Sequence: Synthetic oligonucleotide
uuuauaguugccaaa

SEQ ID NO: 300 - RNA, 15 nt, Artificial Sequence
  Description of Artificial Sequence: Synthetic oligonucleotide
cucuaacacacucua

SEQ ID NO: 301 - RNA, 15 nt, Artificial Sequence
  Description of Artificial Sequence: Synthetic oligonucleotide
ggaugaaauggugaa

SEQ ID NO: 302 - RNA, 15 nt, Artificial Sequence
  Description of Artificial Sequence: Synthetic oligonucleotide
uuguuaucagcuaga

SEQ ID NO: 303 - RNA, 15 nt, Artificial Sequence
  Description of Artificial Sequence: Synthetic oligonucleotide
gcaagucagugcaaa

SEQ ID NO: 304 - RNA, 15 nt, Artificial Sequence
  Description of Artificial Sequence: Synthetic oligonucleotide
uugagugcuaaagca

SEQ ID NO: 305 - RNA, 15 nt, Artificial Sequence
  Description of Artificial Sequence: Synthetic oligonucleotide
uuaggugaaacugaa

SEQ ID NO: 306 - RNA, 15 nt, Artificial Sequence
  Description of Artificial Sequence: Synthetic oligonucleotide
cuuccucuugucuga

SEQ ID NO: 307 - RNA, 15 nt, Artificial Sequence
  Description of Artificial Sequence: Synthetic oligonucleotide
aguaaaguucuugaa

SEQ ID NO: 308 - RNA, 15 nt, Artificial Sequence
  Description of Artificial Sequence: Synthetic oligonucleotide
aacacuauugccgca

SEQ ID NO: 309 - RNA, 15 nt, Artificial Sequence
  Description of Artificial Sequence: Synthetic oligonucleotide
aaguguuauaaacaa

SEQ ID NO: 310 - RNA, 15 nt, Artificial Sequence
  Description of Artificial Sequence: Synthetic oligonucleotide
aagcaaaguguuaua

SEQ ID NO: 311 - RNA, 15 nt, Artificial Sequence
  Description of Artificial Sequence: Synthetic oligonucleotide
guucaaucauucuga

SEQ ID NO: 312 - RNA, 15 nt, Artificial Sequence
  Description of Artificial Sequence: Synthetic oligonucleotide
uggugaaaugcagca

SEQ ID NO: 313 - RNA, 15 nt, Artificial Sequence
  Description of Artificial Sequence: Synthetic oligonucleotide
uacauucuuggugaa

SEQ ID NO: 314 - RNA, 15 nt, Artificial Sequence
  Description of Artificial Sequence: Synthetic oligonucleotide
gggucaucaacuaca

SEQ ID NO: 315 - RNA, 15 nt, Artificial Sequence
  Description of Artificial Sequence: Synthetic oligonucleotide
gaagugaauaggaca

SEQ ID NO: 316 - RNA, 15 nt, Artificial Sequence
  Description of Artificial Sequence: Synthetic oligonucleotide
cucuaauauaccaua

SEQ ID NO: 317 - RNA, 15 nt, Artificial Sequence
  Description of Artificial Sequence: Synthetic oligonucleotide
augggugauuuagaa

SEQ ID NO: 318 - RNA, 15 nt, Artificial Sequence
  Description of Artificial Sequence: Synthetic oligonucleotide
uguauaauuaccgaa

SEQ ID NO: 319 - RNA, 15 nt, Artificial Sequence
  Description of Artificial Sequence: Synthetic oligonucleotide
caggaaacuguauaa

SEQ ID NO: 320 - RNA, 15 nt, Artificial Sequence
  Description of Artificial Sequence: Synthetic oligonucleotide
acaggaaacuguaua

SEQ ID NO: 321 - RNA, 15 nt, Artificial Sequence
  Description of Artificial Sequence: Synthetic oligonucleotide
aauuuagguuccuga

SEQ ID NO: 322 - RNA, 15 nt, Artificial Sequence
  Description of Artificial Sequence: Synthetic oligonucleotide
gucaugauacucuaa

SEQ ID NO: 323 - RNA, 15 nt, Artificial Sequence
  Description of Artificial Sequence: Synthetic oligonucleotide
gaacgucaugauaca

SEQ ID NO: 324 - RNA, 15 nt, Artificial Sequence
  Description of Artificial Sequence: Synthetic oligonucleotide
caguauuauugggua

SEQ ID NO: 325 - RNA, 15 nt, Artificial Sequence
  Description of Artificial Sequence: Synthetic oligonucleotide
ccauaugaugccgua

SEQ ID NO: 326 - RNA, 15 nt, Artificial Sequence
  Description of Artificial Sequence: Synthetic oligonucleotide
ugguucaaucuguca

SEQ ID NO: 327 - RNA, 15 nt, Artificial Sequence
  Description of Artificial Sequence: Synthetic oligonucleotide
uuuggccuuguugua

SEQ ID NO: 328 - RNA, 15 nt, Artificial Sequence
  Description of Artificial Sequence: Synthetic oligonucleotide
uugucugauuaguua

SEQ ID NO: 329 - RNA, 15 nt, Artificial Sequence
  Description of Artificial Sequence: Synthetic oligonucleotide
caauuugauggcaca

SEQ ID NO: 330 - RNA, 15 nt, Artificial Sequence
  Description of Artificial Sequence: Synthetic oligonucleotide
uuggaucuuugucaa

SEQ ID NO: 331 - RNA, 15 nt, Artificial Sequence
  Description of Artificial Sequence: Synthetic oligonucleotide
uuuggaucuuuguca

SEQ ID NO: 332 - RNA, 15 nt, Artificial Sequence
  Description of Artificial Sequence: Synthetic oligonucleotide
aucuuugaaauuuga

SEQ ID NO: 333 - RNA, 15 nt, Artificial Sequence
  Description of Artificial Sequence: Synthetic oligonucleotide
cuugaucuuugaaaa

SEQ ID NO: 334 - RNA, 15 nt, Artificial Sequence
  Description of Artificial Sequence: Synthetic oligonucleotide
uaugcuuauucagca

SEQ ID NO: 335 - RNA, 15 nt, Artificial Sequence
  Description of Artificial Sequence: Synthetic oligonucleotide
ucauccaaaucugca

SEQ ID NO: 336 - RNA, 18 nt, Artificial Sequence
  Description of Artificial Sequence: Synthetic oligonucleotide
gaaaucauaccaguuaca

SEQ ID NO: 337 - RNA, 18 nt, Artificial Sequence
  Description of Artificial Sequence: Synthetic oligonucleotide
aaguuugcacaaugcaga

SEQ ID NO: 338 - RNA, 18 nt, Artificial Sequence
  Description of Artificial Sequence: Synthetic oligonucleotide
uaguugucugauaucaca

SEQ ID NO: 339 - RNA, 18 nt, Artificial Sequence
  Description of Artificial Sequence: Synthetic oligonucleotide
acggugugacaagcuaca

SEQ ID NO: 340 - RNA, 18 nt, Artificial Sequence
  Description of Artificial Sequence: Synthetic oligonucleotide
uaauaaagaacugacuua

SEQ ID NO: 341 - RNA, 18 nt, Artificial Sequence
  Description of Artificial Sequence: Synthetic oligonucleotide
agcuaggccaauagcaaa

SEQ ID NO: 342 - RNA, 18 nt, Artificial Sequence
  Description of Artificial Sequence: Synthetic oligonucleotide
aaaucauaauuuguggca

SEQ ID NO: 343 - RNA, 18 nt, Artificial Sequence
  Description of Artificial Sequence: Synthetic oligonucleotide
agcuuguaaaguugccaa

SEQ ID NO: 344 - RNA, 18 nt, Artificial Sequence
  Description of Artificial Sequence: Synthetic oligonucleotide
aaauacgacucugucaga

SEQ ID NO: 345 - RNA, 18 nt, Artificial Sequence
  Description of Artificial Sequence: Synthetic oligonucleotide
uaauaaaucaauaacaga

SEQ ID NO: 346 - RNA, 18 nt, Artificial Sequence
  Description of Artificial Sequence: Synthetic oligonucleotide
acagcuguaccuggugca

SEQ ID NO: 347 - RNA, 18 nt, Artificial Sequence
  Description of Artificial Sequence: Synthetic oligonucleotide
aaauuuacucaugucaaa

SEQ ID NO: 348 - RNA, 18 nt, Artificial Sequence
  Description of Artificial Sequence: Synthetic oligonucleotide
aacuucuacuaagccaca

SEQ ID NO: 349 - RNA, 18 nt, Artificial Sequence
  Description of Artificial Sequence: Synthetic oligonucleotide
agcuuaaagaaugucuga

SEQ ID NO: 350 - RNA, 18 nt, Artificial Sequence
  Description of Artificial Sequence: Synthetic oligonucleotide
aaauuugauauuaucaca

SEQ ID NO: 351 - RNA, 18 nt, Artificial Sequence
  Description of Artificial Sequence: Synthetic oligonucleotide
aacgaauuugauguuuca

SEQ ID NO: 352 - RNA, 18 nt, Artificial Sequence
  Description of Artificial Sequence: Synthetic oligonucleotide
aaacuauuauuugcugga

SEQ ID NO: 353 - RNA, 18 nt, Artificial Sequence
  Description of Artificial Sequence: Synthetic oligonucleotide
aauaaauguacuaccaga

SEQ ID NO: 354 - RNA, 18 nt, Artificial Sequence
  Description of Artificial Sequence: Synthetic oligonucleotide
acaucuuuaguuucuaca

SEQ ID NO: 355 - RNA, 18 nt, Artificial Sequence
  Description of Artificial Sequence: Synthetic oligonucleotide
aacaucuuuaguuucuaa

SEQ ID NO: 356 - RNA, 18 nt, Artificial Sequence
  Description of Artificial Sequence: Synthetic oligonucleotide
agcauguuuguuagcaaa

SEQ ID NO: 357 - RNA, 18 nt, Artificial Sequence
  Description of Artificial Sequence: Synthetic oligonucleotide
uaagcaauuguuauccaa

SEQ ID NO: 358 - RNA, 18 nt, Artificial Sequence
  Description of Artificial Sequence: Synthetic oligonucleotide
aacuagcauuauacacua

SEQ ID NO: 359 - RNA, 18 nt, Artificial Sequence
  Description of Artificial Sequence: Synthetic oligonucleotide
uaaauacuucacuuuaga

SEQ ID NO: 360 - RNA, 18 nt, Artificial Sequence
  Description of Artificial Sequence: Synthetic oligonucleotide
aaauucacagacuuuaaa

SEQ ID NO: 361 - RNA, 18 nt, Artificial Sequence
  Description of Artificial Sequence: Synthetic oligonucleotide
caaugguucuaaagccga

SEQ ID NO: 362 - RNA, 18 nt, Artificial Sequence
  Description of Artificial Sequence: Synthetic oligonucleotide
caaguuuguaauauuaga

SEQ ID NO: 363 - RNA, 18 nt, Artificial Sequence
  Description of Artificial Sequence: Synthetic oligonucleotide
uaauuuauaauuauaaua

SEQ ID NO: 364 - RNA, 18 nt, Artificial Sequence
  Description of Artificial Sequence: Synthetic oligonucleotide
guaauuauaauuaccaca

SEQ ID NO: 365 - RNA, 18 nt, Artificial Sequence
  Description of Artificial Sequence: Synthetic oligonucleotide
gaaguugaaauugacaca

SEQ ID NO: 366 - RNA, 18 nt, Artificial Sequence
  Description of Artificial Sequence: Synthetic oligonucleotide
aauuguuggaaaggcaga

SEQ ID NO: 367 - RNA, 18 nt, Artificial Sequence
  Description of Artificial Sequence: Synthetic oligonucleotide
aaauuguuggaaaggcaa

SEQ ID NO: 368 - RNA, 18 nt, Artificial Sequence
  Description of Artificial Sequence: Synthetic oligonucleotide
acaaauguacauuguaca

SEQ ID NO: 369 - RNA, 18 nt, Artificial Sequence
  Description of Artificial Sequence: Synthetic oligonucleotide
auauuguuugaugaagca

SEQ ID NO: 370 - RNA, 18 nt, Artificial Sequence
  Description of Artificial Sequence: Synthetic oligonucleotide
acauucuguguaacucca

SEQ ID NO: 371 - RNA, 18 nt, Artificial Sequence
  Description of Artificial Sequence: Synthetic oligonucleotide
aaguucguuuauguguaa

SEQ ID NO: 372 - RNA, 18 nt, Artificial Sequence
  Description of Artificial Sequence: Synthetic oligonucleotide
acaguuccaauugugaaa

SEQ ID NO: 373 - RNA, 18 nt, Artificial Sequence
  Description of Artificial Sequence: Synthetic oligonucleotide
caacagcaaguugcaaaa

SEQ ID NO: 374 - RNA, 18 nt, Artificial Sequence
  Description of Artificial Sequence: Synthetic oligonucleotide
gaaguagacuaaagcaua

SEQ ID NO: 375 - RNA, 18 nt, Artificial Sequence
  Description of Artificial Sequence: Synthetic oligonucleotide
aaguuuauacucugcaaa

SEQ ID NO: 376 - RNA, 18 nt, Artificial Sequence
  Description of Artificial Sequence: Synthetic oligonucleotide
caaaguuuauacucugca

SEQ ID NO: 377 - RNA, 18 nt, Artificial Sequence
  Description of Artificial Sequence: Synthetic oligonucleotide
uuauucuuacaaaguuua

SEQ ID NO: 378 - RNA, 18 nt, Artificial Sequence
  Description of Artificial Sequence: Synthetic oligonucleotide
aaguuacacuauuguaaa

SEQ ID NO: 379 - RNA, 18 nt, Artificial Sequence
  Description of Artificial Sequence: Synthetic oligonucleotide
agaaguuacacuauugua

SEQ ID NO: 380 - RNA, 18 nt, Artificial Sequence
  Description of Artificial Sequence: Synthetic oligonucleotide
gaaauaggacuuguugua

SEQ ID NO: 381 - RNA, 18 nt, Artificial Sequence
  Description of Artificial Sequence: Synthetic oligonucleotide
uaacuguguaauacaaca

SEQ ID NO: 382 - RNA, 18 nt, Artificial Sequence
  Description of Artificial Sequence: Synthetic oligonucleotide
acagcugguaauagucua

SEQ ID NO: 383 - RNA, 18 nt, Artificial Sequence
  Description of Artificial Sequence: Synthetic oligonucleotide
agaagguaacauguucaa

SEQ ID NO: 384 - RNA, 18 nt, Artificial Sequence
  Description of Artificial Sequence: Synthetic oligonucleotide
uaccugucucuuccgaaa

SEQ ID NO: 385 - RNA, 18 nt, Artificial Sequence
  Description of Artificial Sequence: Synthetic oligonucleotide
acguaccugucucuucca

SEQ ID NO: 386 - RNA, 18 nt, Artificial Sequence
  Description of Artificial Sequence: Synthetic oligonucleotide
aacuauuaacguaccuga

SEQ ID NO: 387 - RNA, 18 nt, Artificial Sequence
  Description of Artificial Sequence: Synthetic oligonucleotide
acgcuauuaacuauuaaa

SEQ ID NO: 388 - RNA, 18 nt, Artificial Sequence
  Description of Artificial Sequence: Synthetic oligonucleotide
gaauaccacgaaagcaaa

SEQ ID NO: 389 - RNA, 18 nt, Artificial Sequence
  Description of Artificial Sequence: Synthetic oligonucleotide
acuagcaagaauaccaca

SEQ ID NO: 390 - RNA, 18 nt, Artificial Sequence
  Description of Artificial Sequence: Synthetic oligonucleotide
uaacaauauugcagcaga

SEQ ID NO: 391 - RNA, 18 nt, Artificial Sequence
  Description of Artificial Sequence: Synthetic oligonucleotide
cacguuaacaauauugca

SEQ ID NO: 392 - RNA, 18 nt, Artificial Sequence
  Description of Artificial Sequence: Synthetic oligonucleotide
uuagaccagaagaucaga

SEQ ID NO: 393 - RNA, 18 nt, Artificial Sequence
  Description of Artificial Sequence: Synthetic oligonucleotide
uaguucguuuagaccaga

SEQ ID NO: 394 - RNA, 18 nt, Artificial Sequence
  Description of Artificial Sequence: Synthetic oligonucleotide
uauuuaguucguuuagaa

SEQ ID NO: 395 - RNA, 18 nt, Artificial Sequence
  Description of Artificial Sequence: Synthetic oligonucleotide
uaauauuuaguucguuua

SEQ ID NO: 396 - RNA, 18 nt, Artificial Sequence
  Description of Artificial Sequence: Synthetic oligonucleotide
acuagguuccauuguuca

SEQ ID NO: 397 - RNA, 18 nt, Artificial Sequence
  Description of Artificial Sequence: Synthetic oligonucleotide
aaccuauuacuagguuca

SEQ ID NO: 398 - RNA, 18 nt, Artificial Sequence
  Description of Artificial Sequence: Synthetic oligonucleotide
aaauccauguaaggaaua

SEQ ID NO: 399 - RNA, 18 nt, Artificial Sequence
  Description of Artificial Sequence: Synthetic oligonucleotide
gcauaggcaaauuguaga

SEQ ID NO: 400 - RNA, 18 nt, Artificial Sequence
  Description of Artificial Sequence: Synthetic oligonucleotide
ccuauuccuguuggcaua

SEQ ID NO: 401 - RNA, 18 nt, Artificial Sequence
  Description of Artificial Sequence: Synthetic oligonucleotide
accuauuccuguuggcaa

SEQ ID NO: 402 - RNA, 18 nt, Artificial Sequence
  Description of Artificial Sequence: Synthetic oligonucleotide
gcuaaaguuacuggccaa

SEQ ID NO: 403 - RNA, 18 nt, Artificial Sequence
  Description of Artificial Sequence: Synthetic oligonucleotide
uaaacagcagcaagcaca

SEQ ID NO: 404 - RNA, 18 nt, Artificial Sequence
  Description of Artificial Sequence: Synthetic oligonucleotide
acagugauuucuuuagga

SEQ ID NO: 405 - RNA, 18 nt, Artificial Sequence
  Description of Artificial Sequence: Synthetic oligonucleotide
agcguucgugauguagca

SEQ ID NO: 406 - RNA, 18 nt, Artificial Sequence
  Description of Artificial Sequence: Synthetic oligonucleotide
gaaagcguucgugaugua

SEQ ID NO: 407 - RNA, 18 nt, Artificial Sequence
  Description of Artificial Sequence: Synthetic oligonucleotide
uaauuuauaguugccaaa

SEQ ID NO: 408 - RNA, 18 nt, Artificial Sequence
  Description of Artificial Sequence: Synthetic oligonucleotide
uaccucuaacacacucua

SEQ ID NO: 409 - RNA, 18 nt, Artificial Sequence
  Description of Artificial Sequence: Synthetic oligonucleotide
agaggaugaaauggugaa

SEQ ID NO: 410 - RNA, 18 nt, Artificial Sequence
  Description of Artificial Sequence: Synthetic oligonucleotide
aauuuguuaucagcuaga

SEQ ID NO: 411 - RNA, 18 nt, Artificial Sequence
  Description of Artificial Sequence: Synthetic oligonucleotide
aaagcaagucagugcaaa

SEQ ID NO: 412 - RNA, 18 nt, Artificial Sequence
  Description of Artificial Sequence: Synthetic oligonucleotide
aaauugagugcuaaagca

SEQ ID NO: 413 - RNA, 18 nt, Artificial Sequence
  Description of Artificial Sequence: Synthetic oligonucleotide
aguuuaggugaaacugaa

SEQ ID NO: 414 - RNA, 18 nt, Artificial Sequence
  Description of Artificial Sequence: Synthetic oligonucleotide
gaacuuccucuugucuga

SEQ ID NO: 415 - RNA, 18 nt, Artificial Sequence
  Description of Artificial Sequence: Synthetic oligonucleotide
gagaguaaaguucuugaa

SEQ ID NO: 416 - RNA, 18 nt, Artificial Sequence
  Description of Artificial Sequence: Synthetic oligonucleotide
auaaacacuauugccgca

SEQ ID NO: 417 - RNA, 18 nt, Artificial Sequence
  Description of Artificial Sequence: Synthetic oligonucleotide
gcaaaguguuauaaacaa

SEQ ID NO: 418 - RNA, 18 nt, Artificial Sequence
  Description of Artificial Sequence: Synthetic oligonucleotide
gugaagcaaaguguuaua

SEQ ID NO: 419 - RNA, 18 nt, Artificial Sequence
  Description of Artificial Sequence: Synthetic oligonucleotide
aaaguucaaucauucuga

SEQ ID NO: 420 - RNA, 18 nt, Artificial Sequence
  Description of Artificial Sequence: Synthetic oligonucleotide
ucuuggugaaaugcagca

SEQ ID NO: 421 - RNA, 18 nt, Artificial Sequence
  Description of Artificial Sequence: Synthetic oligonucleotide
aacuacauucuuggugaa

SEQ ID NO: 422 - RNA, 18 nt, Artificial Sequence
  Description of Artificial Sequence: Synthetic oligonucleotide
cacgggucaucaacuaca

SEQ ID NO: 423 - RNA, 18 nt, Artificial Sequence
  Description of Artificial Sequence: Synthetic oligonucleotide
auagaagugaauaggaca

SEQ ID NO: 424 - RNA, 18 nt, Artificial Sequence
  Description of Artificial Sequence: Synthetic oligonucleotide
cuacucuaauauaccaua

SEQ ID NO: 425 - RNA, 18 nt, Artificial Sequence
  Description of Artificial Sequence: Synthetic oligonucleotide
ugaaugggugauuuagaa

SEQ ID NO: 426 - RNA, 18 nt, Artificial Sequence
  Description of Artificial Sequence: Synthetic oligonucleotide
aacuguauaauuaccgaa

SEQ ID NO: 427 - RNA, 18 nt, Artificial Sequence
  Description of Artificial Sequence: Synthetic oligonucleotide
aaacaggaaacuguauaa

SEQ ID NO: 428 - RNA, 18 nt, Artificial Sequence
  Description of Artificial Sequence: Synthetic oligonucleotide
uaaacaggaaacuguaua

SEQ ID NO: 429 - RNA, 18 nt, Artificial Sequence
  Description of Artificial Sequence: Synthetic oligonucleotide
cccaauuuagguuccuga

SEQ ID NO: 430 - RNA, 18 nt, Artificial Sequence
  Description of Artificial Sequence: Synthetic oligonucleotide
aacgucaugauacucuaa

SEQ ID NO: 431 - RNA, 18 nt, Artificial Sequence
  Description of Artificial Sequence: Synthetic oligonucleotide
cacgaacgucaugauaca

SEQ ID NO: 432 - RNA, 18 nt, Artificial Sequence
  Description of Artificial Sequence: Synthetic oligonucleotide
acgcaguauuauugggua

SEQ ID NO: 433 - RNA, 18 nt, Artificial Sequence
  Description of Artificial Sequence: Synthetic oligonucleotide
aacccauaugaugccgua

SEQ ID NO: 434 - RNA, 18 nt, Artificial Sequence
  Description of Artificial Sequence: Synthetic oligonucleotide
agcugguucaaucuguca

SEQ ID NO: 435 - RNA, 18 nt, Artificial Sequence
  Description of Artificial Sequence: Synthetic oligonucleotide
caguuuggccuuguugua

SEQ ID NO: 436 - RNA, 18 nt, Artificial Sequence
  Description of Artificial Sequence: Synthetic oligonucleotide
uccuugucugauuaguua

SEQ ID NO: 437 - RNA, 18 nt, Artificial Sequence
  Description of Artificial Sequence: Synthetic oligonucleotide
auccaauuugauggcaca

SEQ ID NO: 438 - RNA, 18 nt, Artificial Sequence
  Description of Artificial Sequence: Synthetic oligonucleotide
aauuuggaucuuugucaa

SEQ ID NO: 439 - RNA, 18 nt, Artificial Sequence
  Description of Artificial Sequence: Synthetic oligonucleotide
aaauuuggaucuuuguca

SEQ ID NO: 440 - RNA, 18 nt, Artificial Sequence
  Description of Artificial Sequence: Synthetic oligonucleotide
uugaucuuugaaauuuga

SEQ ID NO: 441 - RNA, 18 nt, Artificial Sequence
  Description of Artificial Sequence: Synthetic oligonucleotide
ugacuugaucuuugaaaa

SEQ ID NO: 442 - RNA, 18 nt, Artificial Sequence
  Description of Artificial Sequence: Synthetic oligonucleotide
caauaugcuuauucagca

SEQ ID NO: 443 - RNA, 18 nt, Artificial Sequence
  Description of Artificial Sequence: Synthetic oligonucleotide
aaaucauccaaaucugca

SEQ ID NO: 444 - RNA, 20 nt, Severe acute respiratory syndrome coronavirus 2
cuggccuugaagccccuuuu

SEQ ID NO: 445 - RNA, 20 nt, Severe acute respiratory syndrome coronavirus 2
uccaaaaucauaacccucaa

SEQ ID NO: 446 - RNA, 20 nt, Severe acute respiratory syndrome coronavirus 2
uacgacuauuguauaccuua

SEQ ID NO: 447 - RNA, 20 nt, Severe acute respiratory syndrome coronavirus 2
uuucggauggcuuauuguug

SEQ ID NO: 448 - RNA, 20 nt, Severe acute respiratory syndrome coronavirus 2
aucuggaguaaaagacugug

SEQ ID NO: 449 - RNA, 20 nt, Severe acute respiratory syndrome coronavirus 2
gcuggcauacuaauuguuac

SEQ ID NO: 450 - RNA, 20 nt, Severe acute respiratory syndrome coronavirus 2
uuguuguuuguaacaguuua

SEQ ID NO: 451 - RNA, 20 nt, Severe acute respiratory syndrome coronavirus 2
uuggcuuugcuggaaaugcc

SEQ ID NO: 452 - RNA, 20 nt, Severe acute respiratory syndrome coronavirus 2
aguccuauuucugaacauga

SEQ ID NO: 453 - RNA, 20 nt, Severe acute respiratory syndrome coronavirus 2
aagaacauguccaaauucac

SEQ ID NO: 454 - RNA, 20 nt, Severe acute respiratory syndrome coronavirus 2
uuuguaagaauaauaaugag

SEQ ID NO: 455 - RNA, 20 nt, Severe acute respiratory syndrome coronavirus 2
guauaccuuacaauagugua

SEQ ID NO: 456 - RNA, 20 nt, Severe acute respiratory syndrome coronavirus 2
auuguuacgacuauuguaua

SEQ ID NO: 457 - RNA, 20 nt, Severe acute respiratory syndrome coronavirus 2
augagccugaagaacauguc

SEQ ID NO: 458 - RNA, 20 nt, Severe acute respiratory syndrome coronavirus 2
uauaccuuacaauaguguaa

SEQ ID NO: 459 - RNA, 20 nt, Severe acute respiratory syndrome coronavirus 2
ccaguaauggaaccaauuua

SEQ ID NO: 460 - RNA, 20 nt, Severe acute respiratory syndrome coronavirus 2
uucucuaucuuuaugcuuua

SEQ ID NO: 461 - RNA, 20 nt, Severe acute respiratory syndrome coronavirus 2
gauggcaacuagcacucucc

SEQ ID NO: 462 - RNA, 20 nt, Severe acute respiratory syndrome coronavirus 2
cuccaaggguguucacuuug

SEQ ID NO: 463 - RNA, 20 nt, Severe acute respiratory syndrome coronavirus 2
augagaaucuucacaauugg

SEQ ID NO: 464 - RNA, 20 nt, Severe acute respiratory syndrome coronavirus 2
uuggcguugcacuucuugcu

SEQ ID NO: 465 - RNA, 20 nt, Severe acute respiratory syndrome coronavirus 2
uguaacaguuuacucacacc

SEQ ID NO: 466 - RNA, 20 nt, Severe acute respiratory syndrome coronavirus 2
gacggcguaaaacacgucua

SEQ ID NO: 467 - RNA, 20 nt, Severe acute respiratory syndrome coronavirus 2
uuuaaaagaaccuugcucuu

SEQ ID NO: 468 - RNA, 20 nt, Severe acute respiratory syndrome coronavirus 2
gaggacuuuuaaaguuucca

SEQ ID NO: 469 - RNA, 20 nt, Severe acute respiratory syndrome coronavirus 2
uuuuaaaguuuccauuugga

SEQ ID NO: 470 - RNA, 20 nt, Severe acute respiratory syndrome coronavirus 2
ugaggacuuuuaaaguuucc

SEQ ID NO: 471 - RNA, 20 nt, Severe acute respiratory syndrome coronavirus 2
acugagaauaaauauucuca

SEQ ID NO: 472 - RNA, 20 nt, Severe acute respiratory syndrome coronavirus 2
ccugacggcguaaaacacgu

SEQ ID NO: 473 - RNA, 20 nt, Severe acute respiratory syndrome coronavirus 2
agagguacaacaguacuuuu

SEQ ID NO: 474 - RNA, 20 nt, Severe acute respiratory syndrome coronavirus 2
agagauauuacuaauuauua

SEQ ID NO: 475 - RNA, 20 nt, Severe acute respiratory syndrome coronavirus 2
ugaaaauuauucuuuucuug

SEQ ID NO: 476 - RNA, 20 nt, Severe acute respiratory syndrome coronavirus 2
gauuacaucauaaaccucau

SEQ ID NO: 477 - RNA, 20 nt, Severe acute respiratory syndrome coronavirus 2
auuacuaauuauuaugagga

SEQ ID NO: 478 - RNA, 20 nt, Severe acute respiratory syndrome coronavirus 2
uuaucuaagucacuaacuga

SEQ ID NO: 479 - RNA, 20 nt, Severe acute respiratory syndrome coronavirus 2
guuacuauagcagagauauu

SEQ ID NO: 480 - RNA, 20 nt, Severe acute respiratory syndrome coronavirus 2
augaggacuuuuaaaguuuc

SEQ ID NO: 481 - RNA, 20 nt, Severe acute respiratory syndrome coronavirus 2
uguuucaucucguugacuuu

SEQ ID NO: 482 - RNA, 20 nt, Severe acute respiratory syndrome coronavirus 2
uacaucauaaaccucauaau

SEQ ID NO: 483 - RNA, 20 nt, Severe acute respiratory syndrome coronavirus 2
aacugagaauaaauauucuc

SEQ ID NO: 484 - RNA, 20 nt, Severe acute respiratory syndrome coronavirus 2
uaugaggacuuuuaaaguuu

SEQ ID NO: 485 - RNA, 20 nt, Severe acute respiratory syndrome coronavirus 2
ugauuaaacgaacaugaaaa

SEQ ID NO: 486 - RNA, 20 nt, Severe acute respiratory syndrome coronavirus 2
gacagaaugauugaacuuuc

SEQ ID NO: 487 - RNA, 20 nt, Severe acute respiratory syndrome coronavirus 2
uaucacuaccaagagugugu

SEQ ID NO: 488 - RNA, 20 nt, Severe acute respiratory syndrome coronavirus 2
uuagccuuucugcuauuccu

SEQ ID NO: 489 - RNA, 20 nt, Severe acute respiratory syndrome coronavirus 2
ucugcuauuccuuguuuuaa

SEQ ID NO: 490 - RNA, 20 nt, Severe acute respiratory syndrome coronavirus 2
acgaacaugaaauuucuugu

SEQ ID NO: 491 - RNA, 20 nt, Severe acute respiratory syndrome coronavirus 2
cguguuguuuuagauuucau

SEQ ID NO: 492 - RNA, 20 nt, Severe acute respiratory syndrome coronavirus 2
ugaaauuucuuguuuucuua

SEQ ID NO: 493 - RNA, 20 nt, Severe acute respiratory syndrome coronavirus 2
uuuaccuuuuacaauuaauu

SEQ ID NO: 494 - RNA, 20 nt, Severe acute respiratory syndrome coronavirus 2
uucugcuauuccuuguuuua

SEQ ID NO: 495 - RNA, 20 nt, Severe acute respiratory syndrome coronavirus 2
uauuccuuguuuuaauuaug

SEQ ID NO: 496 - RNA, 20 nt, Severe acute respiratory syndrome coronavirus 2
uagccuuucugcuauuccuu

SEQ ID NO: 497 - RNA, 20 nt, Severe acute respiratory syndrome coronavirus 2
uguuuuaauuaugcuuauua

SEQ ID NO: 498 - RNA, 20 nt, Severe acute respiratory syndrome coronavirus 2
gcuagaaaaucagcaccuuu

SEQ ID NO: 499 - RNA, 20 nt, Severe acute respiratory syndrome coronavirus 2
uuuagccuuucugcuauucc

SEQ ID NO: 500 - RNA, 20 nt, Severe acute respiratory syndrome coronavirus 2
uucguguuguuuuagauuuc

SEQ ID NO: 501 - RNA, 20 nt, Severe acute respiratory syndrome coronavirus 2
uuuuaauuaugcuuauuauc

SEQ ID NO: 502 - RNA, 20 nt, Severe acute respiratory syndrome coronavirus 2
cucaacaucaaccauaugua

SEQ ID NO: 503 - RNA, 20 nt, Severe acute respiratory syndrome coronavirus 2
agcuagaaaaucagcaccuu

SEQ ID NO: 504 - RNA, 20 nt, Severe acute respiratory syndrome coronavirus 2
uagaguaucaugacguucgu

SEQ ID NO: 505 - RNA, 20 nt, Severe acute respiratory syndrome coronavirus 2
acuuucauuaauugacuucu

SEQ ID NO: 506 - RNA, 20 nt, Severe acute respiratory syndrome coronavirus 2
ucauguacucaacaucaacc

SEQ ID NO: 507 - RNA, 20 nt, Severe acute respiratory syndrome coronavirus 2
auucaguacaucgauaucgg

SEQ ID NO: 508 - RNA, 20 nt, Severe acute respiratory syndrome coronavirus 2
auucuaaaugguauauuaga

SEQ ID NO: 509 - RNA, 20 nt, Severe acute respiratory syndrome coronavirus 2
acaugaaauuucuuguuuuc

SEQ ID NO: 510 - RNA, 20 nt, Severe acute respiratory syndrome coronavirus 2
ugagucuuguaaaaccuucu

SEQ ID NO: 511 - RNA, 20 nt, Severe acute respiratory syndrome coronavirus 2
gagucuuguaaaaccuucuu

SEQ ID NO: 512 - RNA, 20 nt, Severe acute respiratory syndrome coronavirus 2
agucuuguaaaaccuucuuu

SEQ ID NO: 513 - RNA, 20 nt, Severe acute respiratory syndrome coronavirus 2
ucuaaacgaacuaaauauua

SEQ ID NO: 514 - RNA, 20 nt, Severe acute respiratory syndrome coronavirus 2
ucuugcuaguuacacuagcc

SEQ ID NO: 515 - RNA, 20 nt, Severe acute respiratory syndrome coronavirus 2
uucggaagagacagguacgu

SEQ ID NO: 516 - RNA, 20 nt, Severe acute respiratory syndrome coronavirus 2
ucuucuggucuaaacgaacu

SEQ ID NO: 517 - RNA, 20 nt, Severe acute respiratory syndrome coronavirus 2
guuaauagcguacuucuuuu

SEQ ID NO: 518 - RNA, 20 nt, Severe acute respiratory syndrome coronavirus 2
gugguauucuugcuaguuac

SEQ ID NO: 519 - RNA, 20 nt, Severe acute respiratory syndrome coronavirus 2
uacguuaauaguuaauagcg

SEQ ID NO: 520 - RNA, 20 nt, Severe acute respiratory syndrome coronavirus 2
ucggaagagacagguacguu

SEQ ID NO: 521 - RNA, 20 nt, Severe acute respiratory syndrome coronavirus 2
gcuuucgugguauucuugcu

SEQ ID NO: 522 - RNA, 20 nt, Severe acute respiratory syndrome coronavirus 2
uuuacguuuacucucguguu

SEQ ID NO: 523 - RNA, 20 nt, Severe acute respiratory syndrome coronavirus 2
agagacagguacguuaauag

SEQ ID NO: 524 - RNA, 20 nt, Severe acute respiratory syndrome coronavirus 2
uaauaguuaauagcguacuu

SEQ ID NO: 525 - RNA, 20 nt, Severe acute respiratory syndrome coronavirus 2
ucgugguauucuugcuaguu

SEQ ID NO: 526 - RNA, 20 nt, Severe acute respiratory syndrome coronavirus 2
cuggucuaaacgaacuaaau

SEQ ID NO: 527 - RNA, 20 nt, Severe acute respiratory syndrome coronavirus 2
augaguacgaacuuauguac

SEQ ID NO: 528 - RNA, 20 nt, Severe acute respiratory syndrome coronavirus 2
cuaaacgaacuaaauauuau

SEQ ID NO: 529 - RNA, 20 nt, Severe acute respiratory syndrome coronavirus 2
uacguuuacucucguguuaa

SEQ ID NO: 530 - RNA, 20 nt, Severe acute respiratory syndrome coronavirus 2
auaguuaauagcguacuucu

SEQ ID NO: 531 - RNA, 20 nt, Severe acute respiratory syndrome coronavirus 2
uucuggucuaaacgaacuaa

SEQ ID NO: 532 - RNA, 20 nt, Severe acute respiratory syndrome coronavirus 2
uuagccauggcagauuccaa

SEQ ID NO: 533 - RNA, 20 nt, Severe acute respiratory syndrome coronavirus 2
cauggcagauuccaacggua

SEQ ID NO: 534 - RNA, 20 nt, Severe acute respiratory syndrome coronavirus 2
uuuuguauauaauuaaguua

SEQ ID NO: 535 - RNA, 20 nt, Severe acute respiratory syndrome coronavirus 2
auuccuuacauggauuuguc

SEQ ID NO: 536 - RNA, 20 nt, Severe acute respiratory syndrome coronavirus 2
uugaacaauggaaccuagua

SEQ ID NO: 537 - RNA, 20 nt, Severe acute respiratory syndrome coronavirus 2
ugcugcauacagucgcuaca

SEQ ID NO: 538 - RNA, 20 nt, Severe acute respiratory syndrome coronavirus 2
uuucuuauuacaaauuggga

SEQ ID NO: 539 - RNA, 20 nt, Severe acute respiratory syndrome coronavirus 2
uggaaccuaguaauagguuu

SEQ ID NO: 540 - RNA, 20 nt, Severe acute respiratory syndrome coronavirus 2
uacagaauaaauuggaucac

SEQ ID NO: 541 - RNA, 20 nt, Severe acute respiratory syndrome coronavirus 2
uuuucuguuuggaacuuuaa

SEQ ID NO: 542 - RNA, 20 nt, Severe acute respiratory syndrome coronavirus 2
uuacauggauuugucuucua

SEQ ID NO: 543 - RNA, 20 nt, Severe acute respiratory syndrome coronavirus 2
uaauagguuuccuauuccuu

SEQ ID NO: 544 - RNA, 20 nt, Severe acute respiratory syndrome coronavirus 2
guuuggaacuuuaauuuuag

SEQ ID NO: 545 - RNA, 20 nt, Severe acute respiratory syndrome coronavirus 2
uggcucagcuacuucauugc

SEQ ID NO: 546 - RNA, 20 nt, Severe acute respiratory syndrome coronavirus 2
ccuugaacaauggaaccuag

SEQ ID NO: 547 - RNA, 20 nt, Severe acute respiratory syndrome coronavirus 2
uuggcaacuauaaauuaaac

SEQ ID NO: 548 - RNA, 20 nt, Severe acute respiratory syndrome coronavirus 2
gcuucuuucagacuguuugc

SEQ ID NO: 549 - RNA, 20 nt, Severe acute respiratory syndrome coronavirus 2
uggccaguaacuuuagcuug

SEQ ID NO: 550 - RNA, 20 nt, Severe acute respiratory syndrome coronavirus 2
gcuuucuuauuacaaauugg

SEQ ID NO: 551 - RNA, 20 nt, Severe acute respiratory syndrome coronavirus 2
uccaguagcagugacaauau

SEQ ID NO: 552 - RNA, 20 nt, Severe acute respiratory syndrome coronavirus 2
gugacaauauugcuuugcuu

SEQ ID NO: 553 - RNA, 20 nt, Severe acute respiratory syndrome coronavirus 2
acgaacuaaauauuauauua

SEQ ID NO: 554 - RNA, 20 nt, Severe acute respiratory syndrome coronavirus 2
uugcugaauaagcauauuga

SEQ ID NO: 555 - RNA, 20 nt, Severe acute respiratory syndrome coronavirus 2
uucggaaugucgcgcauugg

SEQ ID NO: 556 - RNA, 20 nt, Severe acute respiratory syndrome coronavirus 2
cguuccaauuaacaccaaua

SEQ ID NO: 557 - RNA, 20 nt, Severe acute respiratory syndrome coronavirus 2
uuccucaaggaacaacauug

SEQ ID NO: 558 - RNA, 20 nt, Severe acute respiratory syndrome coronavirus 2
caguccaagaugguauuucu

SEQ ID NO: 559 - RNA, 20 nt, Severe acute respiratory syndrome coronavirus 2
gacgguaaaaugaaagaucu

SEQ ID NO: 560 - RNA, 20 nt, Severe acute respiratory syndrome coronavirus 2
cuugagagcaaaaugucugg

SEQ ID NO: 561 - RNA, 20 nt, Severe acute respiratory syndrome coronavirus 2
ucaaagaucaagucauuuug

SEQ ID NO: 562 - RNA, 20 nt, Severe acute respiratory syndrome coronavirus 2
ccgcaaauugcacaauuugc

SEQ ID NO: 563 - RNA, 20 nt, Severe acute respiratory syndrome coronavirus 2
cgaacaaacuaaaaugucug

SEQ ID NO: 564 - RNA, 20 nt, Severe acute respiratory syndrome coronavirus 2
gaggacaaggcguuccaauu

SEQ ID NO: 565 - RNA, 20 nt, Severe acute respiratory syndrome coronavirus 2
uuggggaccaggaacuaauc

SEQ ID NO: 566 - RNA, 20 nt, Severe acute respiratory syndrome coronavirus 2
ucuuccugcugcagauuugg

SEQ ID NO: 567 - RNA, 20 nt, Severe acute respiratory syndrome coronavirus 2
gcagauuuggaugauuucuc

SEQ ID NO: 568 - RNA, 20 nt, Severe acute respiratory syndrome coronavirus 2
ggggaccaggaacuaaucag

SEQ ID NO: 569 - RNA, 20 nt, Severe acute respiratory syndrome coronavirus 2
ucagacaaggaacugauuac

SEQ ID NO: 570 - RNA, 20 nt, Severe acute respiratory syndrome coronavirus 2
gaugacaaagauccaaauuu

SEQ ID NO: 571 - RNA, 20 nt, Severe acute respiratory syndrome coronavirus 2
auugacgcauacaaaacauu

SEQ ID NO: 572 - RNA, 20 nt, Severe acute respiratory syndrome coronavirus 2
ccaagaugguauuucuacua

SEQ ID NO: 573 - RNA, 20 nt, Severe acute respiratory syndrome coronavirus 2
gggaccaggaacuaaucaga

SEQ ID NO: 574 - RNA, 20 nt, Severe acute respiratory syndrome coronavirus 2
cguacugccacuaaagcaua

SEQ ID NO: 575 - RNA, 20 nt, Severe acute respiratory syndrome coronavirus 2
ggagccuugaauacaccaaa

SEQ ID NO: 576 - RNA, 20 nt, Severe acute respiratory syndrome coronavirus 2
uuuggcauauauucuuuuca

SEQ ID NO: 577 - RNA, 20 nt, Severe acute respiratory syndrome coronavirus 2
uggggaauguccaaauuuug

SEQ ID NO: 578 - RNA, 20 nt, Severe acute respiratory syndrome coronavirus 2
ugccacuguagcuuauuuua

SEQ ID NO: 579 - RNA, 20 nt, Severe acute respiratory syndrome coronavirus 2
ugugacuuaaaagguaagua

SEQ ID NO: 580 - RNA, 20 nt, Severe acute respiratory syndrome coronavirus 2
uccuaaagugaaguauuuau

SEQ ID NO: 581 - RNA, 20 nt, Severe acute respiratory syndrome coronavirus 2
cuuguuacaaugccacuugg

SEQ ID NO: 582 - RNA, 20 nt, Severe acute respiratory syndrome coronavirus 2
ugugaugguacaacauuuac

SEQ ID NO: 583 - RNA, 20 nt, Severe acute respiratory syndrome coronavirus 2
auuguuaugauaccaaugua

SEQ ID NO: 584 - RNA, 20 nt, Severe acute respiratory syndrome coronavirus 2
ugcgaauuuuguggcacuga

SEQ ID NO: 585 - RNA, 20 nt, Severe acute respiratory syndrome coronavirus 2
auuuccacaaagcauuucua

SEQ ID NO: 586 - RNA, 20 nt, Severe acute respiratory syndrome coronavirus 2
uaaaacauuuuauguuuuac

SEQ ID NO: 587 - RNA, 20 nt, Severe acute respiratory syndrome coronavirus 2
ucugguaagccaguaccaua

SEQ ID NO: 588 - RNA, 20 nt, Severe acute respiratory syndrome coronavirus 2
cuugguguuuaugauuacuu

SEQ ID NO: 589 - RNA, 20 nt, Severe acute respiratory syndrome coronavirus 2
uugaauguggcuaaaucuga

SEQ ID NO: 590 - RNA, 20 nt, Severe acute respiratory syndrome coronavirus 2
uaugacaugguuggauaugg

SEQ ID NO: 591 - RNA, 20 nt, Severe acute respiratory syndrome coronavirus 2
uuuuacuauuaaguguuugc

SEQ ID NO: 592 - RNA, 20 nt, Severe acute respiratory syndrome coronavirus 2
auggcuacauacuacuuauu

SEQ ID NO: 593 - RNA, 20 nt, Severe acute respiratory syndrome coronavirus 2
uagagaaacaaugaguuacu

SEQ ID NO: 594 - RNA, 20 nt, Severe acute respiratory syndrome coronavirus 2
acccacaaguuaaugguuua

SEQ ID NO: 595 - RNA, 20 nt, Severe acute respiratory syndrome coronavirus 2
uucaucaacuuuuaacguac

SEQ ID NO: 596 - RNA, 20 nt, Severe acute respiratory syndrome coronavirus 2
uggcugaucaagcuaugacc

SEQ ID NO: 597 - RNA, 20 nt, Severe acute respiratory syndrome coronavirus 2
uucuuaaagaaagaugcucc

SEQ ID NO: 598 - RNA, 20 nt, Severe acute respiratory syndrome coronavirus 2
uauaaaauagaagaauuauu

SEQ ID NO: 599 - RNA, 20 nt, Severe acute respiratory syndrome coronavirus 2
gaaggcauuaaaauauuugc

SEQ ID NO: 600 - RNA, 20 nt, Severe acute respiratory syndrome coronavirus 2
ugcaaauuaucaaaagguug

SEQ ID NO: 601 - RNA, 20 nt, Severe acute respiratory syndrome coronavirus 2
uugaaaauaaaacaacauua

SEQ ID NO: 602 - RNA, 20 nt, Severe acute respiratory syndrome coronavirus 2
uaugacaaguugcaauuuac

SEQ ID NO: 603 - RNA, 20 nt, Severe acute respiratory syndrome coronavirus 2
uuaguaaagguagacuuaua

SEQ ID NO: 604 - RNA, 20 nt, Severe acute respiratory syndrome coronavirus 2
ugaugaagguaauugugaca

SEQ ID NO: 605 - RNA, 20 nt, Severe acute respiratory syndrome coronavirus 2
ugauguagaauggaaguucu

SEQ ID NO: 606 - RNA, 20 nt, Severe acute respiratory syndrome coronavirus 2
ugucacauacaauuguugug

SEQ ID NO: 607 - RNA, 20 nt, Severe acute respiratory syndrome coronavirus 2
aaugcaauugcaacauguga

SEQ ID NO: 608 - RNA, 20 nt, Severe acute respiratory syndrome coronavirus 2
ucaacauuagaacaguaugu

SEQ ID NO: 609 - RNA, 20 nt, Severe acute respiratory syndrome coronavirus 2
cagaauaugacuaugucaua

SEQ ID NO: 610 - RNA, 20 nt, Severe acute respiratory syndrome coronavirus 2
guuaucacgcaugauguuuc

SEQ ID NO: 611 - RNA, 20 nt, Severe acute respiratory syndrome coronavirus 2
caugcaaauuacauauuuug

SEQ ID NO: 612 - RNA, 20 nt, Severe acute respiratory syndrome coronavirus 2
guugacaucuaugaaguauu

SEQ ID NO: 613 - RNA, 20 nt, Severe acute respiratory syndrome coronavirus 2
uuuguuaauuuaaaacaauu

SEQ ID NO: 614 - RNA, 20 nt, Severe acute respiratory syndrome coronavirus 2
aaugagugugcucaaguauu

SEQ ID NO: 615 - RNA, 20 nt, Severe acute respiratory syndrome coronavirus 2
ucagaguuuagaaaaugugg

SEQ ID NO: 616 - RNA, 20 nt, Severe acute respiratory syndrome coronavirus 2
aaaagaaggucaaaucaaug

SEQ ID NO: 617 - RNA, 20 nt, Severe acute respiratory syndrome coronavirus 2
auuacuugaugauuuuguug

SEQ ID NO: 618 - RNA, 20 nt, Severe acute respiratory syndrome coronavirus 2
agaacauucuuggaaugcug

SEQ ID NO: 619 - RNA, 20 nt, Severe acute respiratory syndrome coronavirus 2
guugauguagaauuguuuga

SEQ ID NO: 620 - RNA, 20 nt, Severe acute respiratory syndrome coronavirus 2
ggugcaauuucaaguguuuu

SEQ ID NO: 621 - RNA, 20 nt, Severe acute respiratory syndrome coronavirus 2
aucuucaaccuaggacuuuu

SEQ ID NO: 622 - RNA, 20 nt, Severe acute respiratory syndrome coronavirus 2
gcugcuacuaaaaugucaga

SEQ ID NO: 623 - RNA, 20 nt, Severe acute respiratory syndrome coronavirus 2
cugugaauuucaauuuugua

SEQ ID NO: 624 - RNA, 20 nt, Severe acute respiratory syndrome coronavirus 2
ugccauacccacaaauuuua

SEQ ID NO: 625 - RNA, 20 nt, Severe acute respiratory syndrome coronavirus 2
ccaccaauuaaagauuuugg

SEQ ID NO: 626 - RNA, 20 nt, Severe acute respiratory syndrome coronavirus 2
uggaaagauugcugauuaua

SEQ ID NO: 627 - RNA, 20 nt, Severe acute respiratory syndrome coronavirus 2
guuguuauuaaagucuguga

SEQ ID NO: 628 - RNA, 20 nt, Severe acute respiratory syndrome coronavirus 2
uguguuuaagaauauugaug

SEQ ID NO: 629 - RNA, 20 nt, Severe acute respiratory syndrome coronavirus 2
uuccucgugaaggugucuuu

SEQ ID NO: 630 - RNA, 20 nt, Severe acute respiratory syndrome coronavirus 2
cuugacauuacaccauguuc

SEQ ID NO: 631 - RNA, 20 nt, Severe acute respiratory syndrome coronavirus 2
uacacauaaacgaacuuaug

SEQ ID NO: 632 - RNA, 20 nt, Severe acute respiratory syndrome coronavirus 2
auuaacaucacuagguuuca

SEQ ID NO: 633 - RNA, 20 nt, Severe acute respiratory syndrome coronavirus 2
uagggaauuuguguuuaaga

SEQ ID NO: 634 - RNA, 20 nt, Severe acute respiratory syndrome coronavirus 2
uuugcuaugcaaauggcuua

SEQ ID NO: 635 - RNA, 20 nt, Severe acute respiratory syndrome coronavirus 2
ucaaacuuuacuugcuuuac

SEQ ID NO: 636 - RNA, 20 nt, Severe acute respiratory syndrome coronavirus 2
gcugacacuacugaugcugu

SEQ ID NO: 637 - RNA, 20 nt, Severe acute respiratory syndrome coronavirus 2
auugccauaguaauggugac

SEQ ID NO: 638 - RNA, 20 nt, Severe acute respiratory syndrome coronavirus 2
uacacaauuaaaccgugcuu

SEQ ID NO: 639 - RNA, 20 nt, Severe acute respiratory syndrome coronavirus 2
uugagauucuugacauuaca

SEQ ID NO: 640 - RNA, 20 nt, Severe acute respiratory syndrome coronavirus 2
uguccuaccauuuaaugaug

SEQ ID NO: 641 - RNA, 20 nt, Severe acute respiratory syndrome coronavirus 2
accaccaauuaaagauuuug

SEQ ID NO: 642 - DNA, 45 bp, Severe acute respiratory syndrome coronavirus 2
ttttgctcgttgctgctggccttgaagccccttttctctatcttt

SEQ ID NO: 643 - DNA, 45 bp, Severe acute respiratory syndrome coronavirus 2
gtttttcagagcgcttccaaaatcataaccctcaaaaagagatgg

SEQ ID NO: 644 - DNA, 45 bp, Severe acute respiratory syndrome coronavirus 2
tggcatactaattgttacgactattgtataccttacaatagtgta

SEQ ID NO: 645 - DNA, 45 bp, Severe acute respiratory syndrome coronavirus 2
acaagcctcactccctttcggatggcttattgttggcgttgcact

SEQ ID NO: 646 - DNA, 45 bp, Severe acute respiratory syndrome coronavirus 2
tactgaaaaatgggaatctggagtaaaagactgtgttgtattaca

SEQ ID NO: 647 - DNA, 45 bp, Severe acute respiratory syndrome coronavirus 2
ccaactattttctttgctggcatactaattgttacgactattgta

SEQ ID NO: 648 - DNA, 45 bp, Severe acute respiratory syndrome coronavirus 2
gtttgcaacttgctgttgttgtttgtaacagtttactcacacctt

SEQ ID NO: 649 - DNA, 45 bp, Severe acute respiratory syndrome coronavirus 2
aataataatgaggctttggctttgctggaaatgccgttccaaaaa

SEQ ID NO: 650 - DNA, 45 bp, Severe acute respiratory syndrome coronavirus 2
ggtgatggcacaacaagtcctatttctgaacatgactaccagatt

SEQ ID NO: 651 - DNA, 45 bp, Severe acute respiratory syndrome coronavirus 2
ttgttgatgagcctgaagaacatgtccaaattcacacaatcgacg

SEQ ID NO: 652 - DNA, 45 bp, Severe acute respiratory syndrome coronavirus 2
ttgcagagtataaactttgtaagaataataatgaggctttggctt

SEQ ID NO: 653 - DNA, 45 bp, Severe acute respiratory syndrome coronavirus 2
attgttacgactattgtataccttacaatagtgtaacttcttcaa

SEQ ID NO: 654 - DNA, 45 bp, Severe acute respiratory syndrome coronavirus 2
tttgctggcatactaattgttacgactattgtataccttacaata

SEQ ID NO: 655 - DNA, 45 bp, Severe acute respiratory syndrome coronavirus 2
acaataaaattgttgatgagcctgaagaacatgtccaaattcaca

SEQ ID NO: 656 - DNA, 45 bp, Severe acute respiratory syndrome coronavirus 2
ttgttacgactattgtataccttacaatagtgtaacttcttcaat

SEQ ID NO: 657 - DNA, 45 bp, Severe acute respiratory syndrome coronavirus 2
tccggagttgttaatccagtaatggaaccaatttatgatgaaccg

SEQ ID NO: 658 - DNA, 45 bp, Severe acute respiratory syndrome coronavirus 2
gccttgaagccccttttctctatctttatgctttagtctacttct

SEQ ID NO: 659 - DNA, 45 bp, Severe acute respiratory syndrome coronavirus 2
taaccctcaaaaagagatggcaactagcactctccaagggtgttc

SEQ ID NO: 660 - DNA, 45 bp, Severe acute respiratory syndrome coronavirus 2
atggcaactagcactctccaagggtgttcactttgtttgcaactt

SEQ ID NO: 661 - DNA, 45 bp, Severe acute respiratory syndrome coronavirus 2
cttatggatttgtttatgagaatcttcacaattggaactgtaact

SEQ ID NO: 662 - DNA, 45 bp, Severe acute respiratory syndrome coronavirus 2
tcggatggcttattgttggcgttgcacttcttgctgtttttcaga

SEQ ID NO: 663 - DNA, 45 bp, Severe acute respiratory syndrome coronavirus 2
cttgctgttgttgtttgtaacagtttactcacaccttttgctcgt

SEQ ID NO: 664 - DNA, 45 bp, Severe acute respiratory syndrome coronavirus 2
gcttttgcttgtcctgacggcgtaaaacacgtctatcagttacgt

SEQ ID NO: 665 - DNA, 45 bp, Severe acute respiratory syndrome coronavirus 2
aggtacaacagtacttttaaaagaaccttgctcttctggaacata

SEQ ID NO: 666 - DNA, 45 bp, Severe acute respiratory syndrome coronavirus 2
attactaattattatgaggacttttaaagtttccatttggaatct

SEQ ID NO: 667 - DNA, 45 bp, Severe acute respiratory syndrome coronavirus 2
aattattatgaggacttttaaagtttccatttggaatcttgatta

SEQ ID NO: 668 - DNA, 45 bp, Severe acute respiratory syndrome coronavirus 2
tattactaattattatgaggacttttaaagtttccatttggaatc

SEQ ID NO: 669 - DNA, 45 bp, Severe acute respiratory syndrome coronavirus 2
ttatctaagtcactaactgagaataaatattctcaattagatgaa

SEQ ID NO: 670 - DNA, 45 bp, Severe acute respiratory syndrome coronavirus 2
tttgcttttgcttgtcctgacggcgtaaaacacgtctatcagtta

SEQ ID NO: 671 - DNA, 45 bp, Severe acute respiratory syndrome coronavirus 2
taccaagagtgtgttagaggtacaacagtacttttaaaagaacct

SEQ ID NO: 672 - DNA, 45 bp, Severe acute respiratory syndrome coronavirus 2
tcaggttactatagcagagatattactaattattatgaggacttt

SEQ ID NO: 673 - DNA, 45 bp, Severe acute respiratory syndrome coronavirus 2
ttgattaaacgaacatgaaaattattcttttcttggcactgataa

SEQ ID NO: 674 - DNA, 45 bp, Severe acute respiratory syndrome coronavirus 2
tccatttggaatcttgattacatcataaacctcataattaaaaat

SEQ ID NO: 675 - DNA, 45 bp, Severe acute respiratory syndrome coronavirus 2
tactatagcagagatattactaattattatgaggacttttaaagt

SEQ ID NO: 676 - DNA, 45 bp, Severe acute respiratory syndrome coronavirus 2
ctcataattaaaaatttatctaagtcactaactgagaataaatat

SEQ ID NO: 677 - DNA, 45 bp, Severe acute respiratory syndrome coronavirus 2
ctcgttgactttcaggttactatagcagagatattactaattatt

SEQ ID NO: 678 - DNA, 45 bp, Severe acute respiratory syndrome coronavirus 2
atattactaattattatgaggacttttaaagtttccatttggaat

SEQ ID NO: 679 - DNA, 45 bp, Severe acute respiratory syndrome coronavirus 2
gtaagtgacaacagatgtttcatctcgttgactttcaggttacta

SEQ ID NO: 680 - DNA, 45 bp, Severe acute respiratory syndrome coronavirus 2
atttggaatcttgattacatcataaacctcataattaaaaattta

SEQ ID NO: 681 - DNA, 45 bp, Severe acute respiratory syndrome coronavirus 2
tttatctaagtcactaactgagaataaatattctcaattagatga

SEQ ID NO: 682 - DNA, 45 bp, Severe acute respiratory syndrome coronavirus 2
gatattactaattattatgaggacttttaaagtttccatttggaa

SEQ ID NO: 683 - DNA, 45 bp, Severe acute respiratory syndrome coronavirus 2
gcaaccaatggagattgattaaacgaacatgaaaattattctttt

SEQ ID NO: 684 - DNA, 45 bp, Severe acute respiratory syndrome coronavirus 2
cacactcaaaagaaagacagaatgattgaactttcattaattgac

SEQ ID NO: 685 - DNA, 45 bp, Severe acute respiratory syndrome coronavirus 2
gctacttgtgagctttatcactaccaagagtgtgttagaggtaca

SEQ ID NO: 686 - DNA, 45 bp, Severe acute respiratory syndrome coronavirus 2
ttctatttgtgctttttagcctttctgctattccttgttttaatt

SEQ ID NO: 687 - DNA, 45 bp, Severe acute respiratory syndrome coronavirus 2
gtgctttttagcctttctgctattccttgttttaattatgcttat

SEQ ID NO: 688 - DNA, 45 bp, Severe acute respiratory syndrome coronavirus 2
acttgtcacgcctaaacgaacatgaaatttcttgttttcttagga

SEQ ID NO: 689 - DNA, 45 bp, Severe acute respiratory syndrome coronavirus 2
gagtatcatgacgttcgtgttgttttagatttcatctaaacgaac

SEQ ID NO: 690 - DNA, 45 bp, Severe acute respiratory syndrome coronavirus 2
acgcctaaacgaacatgaaatttcttgttttcttaggaatcatca

SEQ ID NO: 691 - DNA, 45 bp, Severe acute respiratory syndrome coronavirus 2
ttatacagtttcctgtttaccttttacaattaattgccaggaacc

SEQ ID NO: 692 - DNA, 45 bp, Severe acute respiratory syndrome coronavirus 2
tgtgctttttagcctttctgctattccttgttttaattatgctta

SEQ ID NO: 693 - DNA, 45 bp, Severe acute respiratory syndrome coronavirus 2
ttttagcctttctgctattccttgttttaattatgcttattatct

SEQ ID NO: 694 - DNA, 45 bp, Severe acute respiratory syndrome coronavirus 2
tctatttgtgctttttagcctttctgctattccttgttttaatta

SEQ ID NO: 695 - DNA, 45 bp, Severe acute respiratory syndrome coronavirus 2
ctttctgctattccttgttttaattatgcttattatcttttggtt

SEQ ID NO: 696 - DNA, 45 bp, Severe acute respiratory syndrome coronavirus 2
tatattagagtaggagctagaaaatcagcacctttaattgaattg

SEQ ID NO: 697 - DNA, 45 bp, Severe acute respiratory syndrome coronavirus 2
cttctatttgtgctttttagcctttctgctattccttgttttaat

SEQ ID NO: 698 - DNA, 45 bp, Severe acute respiratory syndrome coronavirus 2
tagagtatcatgacgttcgtgttgttttagatttcatctaaacga

SEQ ID NO: 699 - DNA, 45 bp, Severe acute respiratory syndrome coronavirus 2
ttctgctattccttgttttaattatgcttattatcttttggttct

SEQ ID NO: 700 - DNA, 45 bp, Severe acute respiratory syndrome coronavirus 2
gtttacagtcatgtactcaacatcaaccatatgtagttgatgacc

SEQ ID NO: 701 - DNA, 45 bp, Severe acute respiratory syndrome coronavirus 2
gtatattagagtaggagctagaaaatcagcacctttaattgaatt

SEQ ID NO: 702 - DNA, 45 bp, Severe acute respiratory syndrome coronavirus 2
tctatgaagactttttagagtatcatgacgttcgtgttgttttag

SEQ ID NO: 703 - DNA, 45 bp, Severe acute respiratory syndrome coronavirus 2
agacagaatgattgaactttcattaattgacttctatttgtgctt

SEQ ID NO: 704 - DNA, 45 bp, Severe acute respiratory syndrome coronavirus 2
gaatgtagtttacagtcatgtactcaacatcaaccatatgtagtt

SEQ ID NO: 705 - DNA, 45 bp, Severe acute respiratory syndrome coronavirus 2
ggttctaaatcacccattcagtacatcgatatcggtaattataca

SEQ ID NO: 706 - DNA, 45 bp, Severe acute respiratory syndrome coronavirus 2
gtcctattcacttctattctaaatggtatattagagtaggagcta

SEQ ID NO: 707 - DNA, 45 bp, Severe acute respiratory syndrome coronavirus 2
gtcacgcctaaacgaacatgaaatttcttgttttcttaggaatca

SEQ ID NO: 708 - DNA, 45 bp, Severe acute respiratory syndrome coronavirus 2
gcaatattgttaacgtgagtcttgtaaaaccttctttttacgttt

SEQ ID NO: 709 - DNA, 45 bp, Severe acute respiratory syndrome coronavirus 2
caatattgttaacgtgagtcttgtaaaaccttctttttacgttta

SEQ ID NO: 710 - DNA, 45 bp, Severe acute respiratory syndrome coronavirus 2
aatattgttaacgtgagtcttgtaaaaccttctttttacgtttac

SEQ ID NO: 711 - DNA, 45 bp, Severe acute respiratory syndrome coronavirus 2
ttcctgatcttctggtctaaacgaactaaatattatattagtttt

SEQ ID NO: 712 - DNA, 45 bp, Severe acute respiratory syndrome coronavirus 2
ttgctttcgtggtattcttgctagttacactagccatccttactg

SEQ ID NO: 713 - DNA, 45 bp, Severe acute respiratory syndrome coronavirus 2
tatgtactcattcgtttcggaagagacaggtacgttaatagttaa

SEQ ID NO: 714 - DNA, 45 bp, Severe acute respiratory syndrome coronavirus 2
ttctagagttcctgatcttctggtctaaacgaactaaatattata

SEQ ID NO: 715 - DNA, 45 bp, Severe acute respiratory syndrome coronavirus 2
acaggtacgttaatagttaatagcgtacttctttttcttgctttc

SEQ ID NO: 716 - DNA, 45 bp, Severe acute respiratory syndrome coronavirus 2
ctttttcttgctttcgtggtattcttgctagttacactagccatc

SEQ ID NO: 717 - DNA, 45 bp, Severe acute respiratory syndrome coronavirus 2
ttcggaagagacaggtacgttaatagttaatagcgtacttctttt

SEQ ID NO: 718 - DNA, 45 bp, Severe acute respiratory syndrome coronavirus 2
atgtactcattcgtttcggaagagacaggtacgttaatagttaat

SEQ ID NO: 719 - DNA, 45 bp, Severe acute respiratory syndrome coronavirus 2
gtacttctttttcttgctttcgtggtattcttgctagttacacta

SEQ ID NO: 720 - DNA, 45 bp, Severe acute respiratory syndrome coronavirus 2
ttgtaaaaccttctttttacgtttactctcgtgttaaaaatctga

SEQ ID NO: 721 - DNA, 45 bp, Severe acute respiratory syndrome coronavirus 2
ctcattcgtttcggaagagacaggtacgttaatagttaatagcgt

SEQ ID NO: 722 - DNA, 45 bp, Severe acute respiratory syndrome coronavirus 2
aagagacaggtacgttaatagttaatagcgtacttctttttcttg

SEQ ID NO: 723 - DNA, 45 bp, Severe acute respiratory syndrome coronavirus 2
ttctttttcttgctttcgtggtattcttgctagttacactagcca

SEQ ID NO: 724 - DNA, 45 bp, Severe acute respiratory syndrome coronavirus 2
agagttcctgatcttctggtctaaacgaactaaatattatattag

SEQ ID NO: 725 - DNA, 45 bp, Severe acute respiratory syndrome coronavirus 2
tgtaagcacaagctgatgagtacgaacttatgtactcattcgttt

SEQ ID NO: 726 - DNA, 45 bp, Severe acute respiratory syndrome coronavirus 2
tcctgatcttctggtctaaacgaactaaatattatattagttttt

SEQ ID NO: 727 - DNA, 45 bp, Severe acute respiratory syndrome coronavirus 2
gtaaaaccttctttttacgtttactctcgtgttaaaaatctgaat

SEQ ID NO: 728 - DNA, 45 bp, Severe acute respiratory syndrome coronavirus 2
gagacaggtacgttaatagttaatagcgtacttctttttcttgct

SEQ ID NO: 729 - DNA, 45 bp, Severe acute respiratory syndrome coronavirus 2
ctagagttcctgatcttctggtctaaacgaactaaatattatatt

SEQ ID NO: 730 - DNA, 45 bp, Severe acute respiratory syndrome coronavirus 2
tttggaactttaattttagccatggcagattccaacggtactatt

SEQ ID NO: 731 - DNA, 45 bp, Severe acute respiratory syndrome coronavirus 2
aactttaattttagccatggcagattccaacggtactattaccgt

SEQ ID NO: 732 - DNA, 45 bp, Severe acute respiratory syndrome coronavirus 2
ccaacaggaataggtttttgtatataattaagttaattttcctct

SEQ ID NO: 733 - DNA, 45 bp, Severe acute respiratory syndrome coronavirus 2
agtaataggtttcctattccttacatggatttgtcttctacaatt

SEQ ID NO: 734 - DNA, 45 bp, Severe acute respiratory syndrome coronavirus 2
agcttaaaaagctccttgaacaatggaacctagtaataggtttcc

SEQ ID NO: 735 - DNA, 45 bp, Severe acute respiratory syndrome coronavirus 2
aggtgactcaggttttgctgcatacagtcgctacaggattggcaa

SEQ ID NO: 736 - DNA, 45 bp, Severe acute respiratory syndrome coronavirus 2
ctacatcacgaacgctttcttattacaaattgggagcttcgcagc

SEQ ID NO: 737 - DNA, 45 bp, Severe acute respiratory syndrome coronavirus 2
aagctccttgaacaatggaacctagtaataggtttcctattcctt

SEQ ID NO: 738 - DNA, 45 bp, Severe acute respiratory syndrome coronavirus 2
gtgcttgctgctgtttacagaataaattggatcaccggtggaatt

SEQ ID NO: 739 - DNA, 45 bp, Severe acute respiratory syndrome coronavirus 2
aaatattatattagtttttctgtttggaactttaattttagccat

SEQ ID NO: 740 - DNA, 45 bp, Severe acute respiratory syndrome coronavirus 2
taggtttcctattccttacatggatttgtcttctacaatttgcct

SEQ ID NO: 741 - DNA, 45 bp, Severe acute respiratory syndrome coronavirus 2
aacaatggaacctagtaataggtttcctattccttacatggattt

SEQ ID NO: 742 - DNA, 45 bp, Severe acute respiratory syndrome coronavirus 2
tatattagtttttctgtttggaactttaattttagccatggcaga

SEQ ID NO: 743 - DNA, 45 bp, Severe acute respiratory syndrome coronavirus 2
cttgtaggcttgatgtggctcagctacttcattgcttctttcaga

SEQ ID NO: 744 - DNA, 45 bp, Severe acute respiratory syndrome coronavirus 2
agagcttaaaaagctccttgaacaatggaacctagtaataggttt

SEQ ID NO: 745 - DNA, 45 bp, Severe acute respiratory syndrome coronavirus 2
acagtcgctacaggattggcaactataaattaaacacagaccatt

SEQ ID NO: 746 - DNA, 45 bp, Severe acute respiratory syndrome coronavirus 2
ctcagctacttcattgcttctttcagactgtttgcgcgtacgcgt

SEQ ID NO: 747 - DNA, 45 bp, Severe acute respiratory syndrome coronavirus 2
ttcctctggctgttatggccagtaactttagcttgttttgtgctt

SEQ ID NO: 748 - DNA, 45 bp, Severe acute respiratory syndrome coronavirus 2
tgctacatcacgaacgctttcttattacaaattgggagcttcgca

SEQ ID NO: 749 - DNA, 45 bp, Severe acute respiratory syndrome coronavirus 2
ttaaacacagaccattccagtagcagtgacaatattgctttgctt

SEQ ID NO: 750 - DNA, 45 bp, Severe acute respiratory syndrome coronavirus 2
accattccagtagcagtgacaatattgctttgcttgtacagtaag

SEQ ID NO: 751 - DNA, 45 bp, Severe acute respiratory syndrome coronavirus 2
gatcttctggtctaaacgaactaaatattatattagtttttctgt

SEQ ID NO: 752 - DNA, 45 bp, Severe acute respiratory syndrome coronavirus 2
aaagatcaagtcattttgctgaataagcatattgacgcatacaaa

SEQ ID NO: 753 - DNA, 45 bp, Severe acute respiratory syndrome coronavirus 2
agcgcttcagcgttcttcggaatgtcgcgcattggcatggaagtc

SEQ ID NO: 754 - DNA, 45 bp, Severe acute respiratory syndrome coronavirus 2
ccctcgaggacaaggcgttccaattaacaccaatagcagtccaga

SEQ ID NO: 755 - DNA, 45 bp, Severe acute respiratory syndrome coronavirus 2
caatcgtgctacaacttcctcaaggaacaacattgccaaaaggct

SEQ ID NO: 756 - DNA, 45 bp, Severe acute respiratory syndrome coronavirus 2
taaaatgaaagatctcagtccaagatggtatttctactacctagg

SEQ ID NO: 757 - DNA, 45 bp, Severe acute respiratory syndrome coronavirus 2
cgaattcgtggtggtgacggtaaaatgaaagatctcagtccaaga

SEQ ID NO: 758 - DNA, 45 bp, Severe acute respiratory syndrome coronavirus 2
gacagattgaaccagcttgagagcaaaatgtctggtaaaggccaa

SEQ ID NO: 759 - DNA, 45 bp, Severe acute respiratory syndrome coronavirus 2
acaaagatccaaatttcaaagatcaagtcattttgctgaataagc

SEQ ID NO: 760 - DNA, 45 bp, Severe acute respiratory syndrome coronavirus 2
gattacaaacattggccgcaaattgcacaatttgcccccagcgct

SEQ ID NO: 761 - DNA, 45 bp, Severe acute respiratory syndrome coronavirus 2
tagatttcatctaaacgaacaaactaaaatgtctgataatggacc

SEQ ID NO: 762 - DNA, 45 bp, Severe acute respiratory syndrome coronavirus 2
accttaaattccctcgaggacaaggcgttccaattaacaccaata

SEQ ID NO: 763 - DNA, 45 bp, Severe acute respiratory syndrome coronavirus 2
aaacccaaggaaattttggggaccaggaactaatcagacaaggaa

SEQ ID NO: 764 - DNA, 45 bp, Severe acute respiratory syndrome coronavirus 2
gcaaactgtgactcttcttcctgctgcagatttggatgatttctc

SEQ ID NO: 765 - DNA, 45 bp, Severe acute respiratory syndrome coronavirus 2
actcttcttcctgctgcagatttggatgatttctccaaacaattg

SEQ ID NO: 766 - DNA, 45 bp, Severe acute respiratory syndrome coronavirus 2
acccaaggaaattttggggaccaggaactaatcagacaaggaact

SEQ ID NO: 767 - DNA, 45 bp, Severe acute respiratory syndrome coronavirus 2
gggaccaggaactaatcagacaaggaactgattacaaacattggc

SEQ ID NO: 768 - DNA, 45 bp, Severe acute respiratory syndrome coronavirus 2
ggtgccatcaaattggatgacaaagatccaaatttcaaagatcaa

SEQ ID NO: 769 - DNA, 45 bp, Severe acute respiratory syndrome coronavirus 2
ttgctgaataagcatattgacgcatacaaaacattcccaccaaca

SEQ ID NO: 770 - DNA, 45 bp, Severe acute respiratory syndrome coronavirus 2
atgaaagatctcagtccaagatggtatttctactacctaggaact

SEQ ID NO: 771 - DNA, 45 bp, Severe acute respiratory syndrome coronavirus 2
cccaaggaaattttggggaccaggaactaatcagacaaggaactg

SEQ ID NO: 772 - DNA, 45 bp, Severe acute respiratory syndrome coronavirus 2
aagcctcggcaaaaacgtactgccactaaagcatacaatgtaaca

SEQ ID NO: 773 - DNA, 45 bp, Severe acute respiratory syndrome coronavirus 2
tgggttgcaactgagggagccttgaatacaccaaaagatcacatt

SEQ ID NO: 774 - DNA, 45 bp, Severe acute respiratory syndrome coronavirus 2
agttgcagagtggtttttggcatatattcttttcactaggttttt

SEQ ID NO: 775 - DNA, 45 bp, Severe acute respiratory syndrome coronavirus 2
atttgacaccttcaatggggaatgtccaaattttgtatttccctt

SEQ ID NO: 776 - DNA, 45 bp, Severe acute respiratory syndrome coronavirus 2
tttgttaccttctcttgccactgtagcttattttaatatggtcta

SEQ ID NO: 777 - DNA, 45 bp, Severe acute respiratory syndrome coronavirus 2
aatcctaaaggattttgtgacttaaaaggtaagtatgtacaaata

SEQ ID NO: 778 - DNA, 45 bp, Severe acute respiratory syndrome coronavirus 2
agacacacctaaaggtcctaaagtgaagtatttatactttattaa

SEQ ID NO: 779 - DNA, 45 bp, Severe acute respiratory syndrome coronavirus 2
gatctaaatgaaactcttgttacaatgccacttggctatgtaaca

SEQ ID NO: 780 - DNA, 45 bp, Severe acute respiratory syndrome coronavirus 2
acatataaaaatacgtgtgatggtacaacatttacttatgcatca

SEQ ID NO: 781 - DNA, 45 bp, Severe acute respiratory syndrome coronavirus 2
gtaagccagtaccatattgttatgataccaatgtactagaaggtt

SEQ ID NO: 782 - DNA, 45 bp, Severe acute respiratory syndrome coronavirus 2
tttgttaaagccacttgcgaattttgtggcactgagaatttgact

SEQ ID NO: 783 - DNA, 45 bp, Severe acute respiratory syndrome coronavirus 2
gcttatatcatttgtatttccacaaagcatttctattggttcttt

SEQ ID NO: 784 - DNA, 45 bp, Severe acute respiratory syndrome coronavirus 2
taattcacatgaaggtaaaacattttatgttttacctaatgatga

SEQ ID NO: 785 - DNA, 45 bp, Severe acute respiratory syndrome coronavirus 2
atttttaaagatgcttctggtaagccagtaccatattgttatgat

SEQ ID NO: 786 - DNA, 45 bp, Severe acute respiratory syndrome coronavirus 2
tactttagactgactcttggtgtttatgattacttagtttctaca

SEQ ID NO: 787 - DNA, 45 bp, Severe acute respiratory syndrome coronavirus 2
aagttgaagaagtctttgaatgtggctaaatctgaatttgaccgt

SEQ ID NO: 788 - DNA, 45 bp, Severe acute respiratory syndrome coronavirus 2
ttgggtgatgcgtattatgacatggttggatatggttgatactag

SEQ ID NO: 789 - DNA, 45 bp, Severe acute respiratory syndrome coronavirus 2
atattataatttggtttttactattaagtgtttgcctaggttctt

SEQ ID NO: 790 - DNA, 45 bp, Severe acute respiratory syndrome coronavirus 2
ttagatgagtggagtatggctacatactacttatttgatgagtct

SEQ ID NO: 791 - DNA, 45 bp, Severe acute respiratory syndrome coronavirus 2
tgagttaggtgatgttagagaaacaatgagttacttgtttcaaca

SEQ ID NO: 792 - DNA, 45 bp, Severe acute respiratory syndrome coronavirus 2
ctaaaaagtggaaatacccacaagttaatggtttaacttctatta

SEQ ID NO: 793 - DNA, 45 bp, Severe acute respiratory syndrome coronavirus 2
ttacgttaatacgttttcatcaacttttaacgtaccaatggaaaa

SEQ ID NO: 794 - DNA, 45 bp, Severe acute respiratory syndrome coronavirus 2
gtaagttggaaaagatggctgatcaagctatgacccaaatgtata

SEQ ID NO: 795 - DNA, 45 bp, Severe acute respiratory syndrome coronavirus 2
gacattgacatcactttcttaaagaaagatgctccatatatagtg

SEQ ID NO: 796 - DNA, 45 bp, Severe acute respiratory syndrome coronavirus 2
tgtagtgacaaagcttataaaatagaagaattattctattcttat

SEQ ID NO: 797 - DNA, 45 bp, Severe acute respiratory syndrome coronavirus 2
tgatgcactatgtgagaaggcattaaaatatttgcctatagataa

SEQ ID NO: 798 - DNA, 45 bp, Severe acute respiratory syndrome coronavirus 2
gttttctagcaatgttgcaaattatcaaaaggttggtatgcaaaa

SEQ ID NO: 799 - DNA, 45 bp, Severe acute respiratory syndrome coronavirus 2
ttgatgtagaattgtttgaaaataaaacaacattacctgttaatg

SEQ ID NO: 800 - DNA, 45 bp, Severe acute respiratory syndrome coronavirus 2
tctgatagagacctttatgacaagttgcaatttacaagtcttgaa

SEQ ID NO: 801 - DNA, 45 bp, Severe acute respiratory syndrome coronavirus 2
tgattttatctcttcttagtaaaggtagacttataattagagaaa

SEQ ID NO: 802 - DNA, 45 bp, Severe acute respiratory syndrome coronavirus 2
tgctttaaggcattttgatgaaggtaattgtgacacattaaaaga

SEQ ID NO: 803 - DNA, 45 bp, Severe acute respiratory syndrome coronavirus 2
gtgtgtacctcaagctgatgtagaatggaagttctatgatgcaca

SEQ ID NO: 804 - DNA, 45 bp, Severe acute respiratory syndrome coronavirus 2
attaaaagaaatacttgtcacatacaattgttgtgatgatgatta

SEQ ID NO: 805 - DNA, 45 bp, Severe acute respiratory syndrome coronavirus 2
aatgttactgactttaatgcaattgcaacatgtgactggacaaat

SEQ ID NO: 806 - DNA, 45 bp, Severe acute respiratory syndrome coronavirus 2
aaattcaaagtgaattcaacattagaacagtatgtcttttgtact

SEQ ID NO: 807 - DNA, 45 bp, Severe acute respiratory syndrome coronavirus 2
attcatcacagggctcagaatatgactatgtcatattcactcaaa

SEQ ID NO: 808 - DNA, 45 bp, Severe acute respiratory syndrome coronavirus 2
atgttttataagggtgttatcacgcatgatgtttcatctgcaatt

SEQ ID NO: 809 - DNA, 45 bp, Severe acute respiratory syndrome coronavirus 2
gatggttatgtcatgcatgcaaattacatattttggaggaataca

SEQ ID NO: 810 - DNA, 45 bp, Severe acute respiratory syndrome coronavirus 2
ggcacatggctttgagttgacatctatgaagtattttgtgaaaat

SEQ ID NO: 811 - DNA, 45 bp, Severe acute respiratory syndrome coronavirus 2
tttgataaaagtgcttttgttaatttaaaacaattaccatttttc

SEQ ID NO: 812 - DNA, 45 bp, Severe acute respiratory syndrome coronavirus 2
ttctatagattagctaatgagtgtgctcaagtattgagtgaaatg

SEQ ID NO: 813 - DNA, 45 bp, Severe acute respiratory syndrome coronavirus 2
cacttttacaagacttcagagtttagaaaatgtggcttttaatgt

SEQ ID NO: 814 - DNA, 45 bp, Severe acute respiratory syndrome coronavirus 2
tgctgttatgtctttaaaagaaggtcaaatcaatgatatgatttt

SEQ ID NO: 815 - DNA, 45 bp, Severe acute respiratory syndrome coronavirus 2
ttctgttattgatttattacttgatgattttgttgaaataataaa

SEQ ID NO: 816 - DNA, 45 bp, Severe acute respiratory syndrome coronavirus 2
ggctataaagataacagaacattcttggaatgctgatctttataa

SEQ ID NO: 817 - DNA, 45 bp, Severe acute respiratory syndrome coronavirus 2
acaaaagttgatggtgttgatgtagaattgtttgaaaataaaaca

SEQ ID NO: 818 - DNA, 45 bp, Severe acute respiratory syndrome coronavirus 2
cttagctccaattttggtgcaatttcaagtgttttaaatgatatc

SEQ ID NO: 819 - DNA, 45 bp, Severe acute respiratory syndrome coronavirus 2
cttattatgtgggttatcttcaacctaggacttttctattaaaat

SEQ ID NO: 820 - DNA, 45 bp, Severe acute respiratory syndrome coronavirus 2
gcttctgctaatcttgctgctactaaaatgtcagagtgtgtactt

SEQ ID NO: 821 - DNA, 45 bp, Severe acute respiratory syndrome coronavirus 2
tgttgttattaaagtctgtgaatttcaattttgtaatgatccatt

SEQ ID NO: 822 - DNA, 45 bp, Severe acute respiratory syndrome coronavirus 2
ctctaataactctattgccatacccacaaattttactattagtgt

SEQ ID NO: 823 - DNA, 45 bp, Severe acute respiratory syndrome coronavirus 2
caaatttacaaaacaccaccaattaaagattttggtggttttaat

SEQ ID NO: 824 - DNA, 45 bp, Severe acute respiratory syndrome coronavirus 2
cgctccagggcaaactggaaagattgctgattataattataaatt

SEQ ID NO: 825 - DNA, 45 bp, Severe acute respiratory syndrome coronavirus 2
aataacgctactaatgttgttattaaagtctgtgaatttcaattt

SEQ ID NO: 826 - DNA, 45 bp, Severe acute respiratory syndrome coronavirus 2
aaatcttagggaatttgtgtttaagaatattgatggttattttaa

SEQ ID NO: 827 - DNA, 45 bp, Severe acute respiratory syndrome coronavirus 2
atggaaaagcacactttcctcgtgaaggtgtctttgtttcaaatg

SEQ ID NO: 828 - DNA, 45 bp, Severe acute respiratory syndrome coronavirus 2
cagacacttgagattcttgacattacaccatgttcttttggtggt

SEQ ID NO: 829 - DNA, 45 bp, Severe acute respiratory syndrome coronavirus 2
ggagtcaaattacattacacataaacgaacttatggatttgttta

SEQ ID NO: 830 - DNA, 45 bp, Severe acute respiratory syndrome coronavirus 2
gatttgccaataggtattaacatcactaggtttcaaactttactt

SEQ ID NO: 831 - DNA, 45 bp, Severe acute respiratory syndrome coronavirus 2
taatttcaaaaatcttagggaatttgtgtttaagaatattgatgg

SEQ ID NO: 832 - DNA, 45 bp, Severe acute respiratory syndrome coronavirus 2
gcattacaaataccatttgctatgcaaatggcttataggtttaat

SEQ ID NO: 833 - DNA, 45 bp, Severe acute respiratory syndrome coronavirus 2
taacatcactaggtttcaaactttacttgctttacatagaagtta

SEQ ID NO: 834 - DNA, 45 bp, Severe acute respiratory syndrome coronavirus 2
tttggcagagacattgctgacactactgatgctgtccgtgatcca

SEQ ID NO: 835 - DNA, 45 bp, Severe acute respiratory syndrome coronavirus 2
tttatagctggcttgattgccatagtaatggtgacaattatgctt

SEQ ID NO: 836 - DNA, 45 bp, Severe acute respiratory syndrome coronavirus 2
atatggcagtttttgtacacaattaaaccgtgctttaactggaat

SEQ ID NO: 837 - DNA, 45 bp, Severe acute respiratory syndrome coronavirus 2
gtgatccacagacacttgagattcttgacattacaccatgttctt

SEQ ID NO: 838 - DNA, 45 bp, Severe acute respiratory syndrome coronavirus 2
gaggtttgataaccctgtcctaccatttaatgatggtgtttattt

SEQ ID NO: 839 - DNA, 45 bp, Severe acute respiratory syndrome coronavirus 2
acaaatttacaaaacaccaccaattaaagattttggtggttttaa

SEQ ID NO: 840 - DNA, 16 bp, Artificial Sequence
  Description of Artificial Sequence: Synthetic oligonucleotide
acttctactaagccac

SEQ ID NO: 841 - DNA, 16 bp, Artificial Sequence
  Description of Artificial Sequence: Synthetic oligonucleotide
aagcttaaagaatgtc

SEQ ID NO: 842 - DNA, 16 bp, Artificial Sequence
  Description of Artificial Sequence: Synthetic oligonucleotide
cagcatgtttgttagc

SEQ ID NO: 843 - DNA, 16 bp, Artificial Sequence
  Description of Artificial Sequence: Synthetic oligonucleotide
gcatgtttgttagcaa

SEQ ID NO: 844 - DNA, 16 bp, Artificial Sequence
  Description of Artificial Sequence: Synthetic oligonucleotide
aagcaattgttatcca

SEQ ID NO: 845 - DNA, 16 bp, Artificial Sequence
  Description of Artificial Sequence: Synthetic oligonucleotide
taagcaattgttatcc

SEQ ID NO: 846 - DNA, 16 bp, Artificial Sequence
  Description of Artificial Sequence: Synthetic oligonucleotide
gtttgcacaatgcaga

SEQ ID NO: 847 - DNA, 16 bp, Artificial Sequence
  Description of Artificial Sequence: Synthetic oligonucleotide
agagctaggccaatag

SEQ ID NO: 848 - DNA, 16 bp, Artificial Sequence
  Description of Artificial Sequence: Synthetic oligonucleotide
agcttgtaaagttgcc

SEQ ID NO: 849 - DNA, 16 bp, Artificial Sequence
  Description of Artificial Sequence: Synthetic oligonucleotide
cagctgtacctggtgc

SEQ ID NO: 850 - DNA, 16 bp, Artificial Sequence
  Description of Artificial Sequence: Synthetic oligonucleotide
acagctgtacctggtg

SEQ ID NO: 851 - DNA, 16 bp, Artificial Sequence
  Description of Artificial Sequence: Synthetic oligonucleotide
aacagctgtacctggt

SEQ ID NO: 852 - DNA, 16 bp, Artificial Sequence
  Description of Artificial Sequence: Synthetic oligonucleotide
aatggttctaaagccg

SEQ ID NO: 853 - DNA, 16 bp, Artificial Sequence
  Description of Artificial Sequence: Synthetic oligonucleotide
caatggttctaaagcc

SEQ ID NO: 854 - DNA, 16 bp, Artificial Sequence
  Description of Artificial Sequence: Synthetic oligonucleotide
tgaagttgaaattgac

SEQ ID NO: 855 - DNA, 16 bp, Artificial Sequence
  Description of Artificial Sequence: Synthetic oligonucleotide
ccacaaatgtacattg

SEQ ID NO: 856 - DNA, 16 bp, Artificial Sequence
  Description of Artificial Sequence: Synthetic oligonucleotide
caatgtacatttgtgg

SEQ ID NO: 857 - DNA, 16 bp, Artificial Sequence
  Description of Artificial Sequence: Synthetic oligonucleotide
agttcgtttatgtgta

SEQ ID NO: 858 - DNA, 16 bp, Artificial Sequence
  Description of Artificial Sequence: Synthetic oligonucleotide
taagttcgtttatgtg

SEQ ID NO: 859 - DNA, 16 bp, Artificial Sequence
  Description of Artificial Sequence: Synthetic oligonucleotide
gaagtagactaaagca

SEQ ID NO: 860 - DNA, 16 bp, Artificial Sequence
  Description of Artificial Sequence: Synthetic oligonucleotide
aataggacttgttgtg

SEQ ID NO: 861 - DNA, 16 bp, Artificial Sequence
  Description of Artificial Sequence: Synthetic oligonucleotide
aactgtgtaatacaac

SEQ ID NO: 862 - DNA, 16 bp, Artificial Sequence
  Description of Artificial Sequence: Synthetic oligonucleotide
acagctggtaatagtc

SEQ ID NO: 863 - DNA, 16 bp, Artificial Sequence
  Description of Artificial Sequence: Synthetic oligonucleotide
cagctggtaatagtct

SEQ ID NO: 864 - DNA, 16 bp, Artificial Sequence
  Description of Artificial Sequence: Synthetic oligonucleotide
tacagctggtaatagt

SEQ ID NO: 865 - DNA, 16 bp, Artificial Sequence
  Description of Artificial Sequence: Synthetic oligonucleotide
tacctgtctcttccga

SEQ ID NO: 866 - DNA, 16 bp, Artificial Sequence
  Description of Artificial Sequence: Synthetic oligonucleotide
taacgtacctgtctct

SEQ ID NO: 867 - DNA, 16 bp, Artificial Sequence
  Description of Artificial Sequence: Synthetic oligonucleotide
aacaatattgcagcag

SEQ ID NO: 868 - DNA, 16 bp, Artificial Sequence
  Description of Artificial Sequence: Synthetic oligonucleotide
taacaatattgcagca

SEQ ID NO: 869 - DNA, 16 bp, Artificial Sequence
  Description of Artificial Sequence: Synthetic oligonucleotide
cgttaacaatattgca

SEQ ID NO: 870 - DNA, 16 bp, Artificial Sequence
  Description of Artificial Sequence: Synthetic oligonucleotide
ctcacgttaacaatat

SEQ ID NO: 871 - DNA, 16 bp, Artificial Sequence
  Description of Artificial Sequence: Synthetic oligonucleotide
acctattactaggttc

SEQ ID NO: 872 - DNA, 16 bp, Artificial Sequence
  Description of Artificial Sequence: Synthetic oligonucleotide
aaacctattactaggt

SEQ ID NO: 873 - DNA, 16 bp, Artificial Sequence
  Description of Artificial Sequence: Synthetic oligonucleotide
acaaatccatgtaagg

SEQ ID NO: 874 - DNA, 16 bp, Artificial Sequence
  Description of Artificial Sequence: Synthetic oligonucleotide
caaatccatgtaagga

SEQ ID NO: 875 - DNA, 16 bp, Artificial Sequence
  Description of Artificial Sequence: Synthetic oligonucleotide
tggcataggcaaattg

SEQ ID NO: 876 - DNA, 16 bp, Artificial Sequence
  Description of Artificial Sequence: Synthetic oligonucleotide
gtaaacagcagcaagc

SEQ ID NO: 877 - DNA, 16 bp, Artificial Sequence
  Description of Artificial Sequence: Synthetic oligonucleotide
gtacctctaacacact

SEQ ID NO: 878 - DNA, 16 bp, Artificial Sequence
  Description of Artificial Sequence: Synthetic oligonucleotide
agcaagtcagtgcaaa

SEQ ID NO: 879 - DNA, 16 bp, Artificial Sequence
  Description of Artificial Sequence: Synthetic oligonucleotide
attgagtgctaaagca

SEQ ID NO: 880 - DNA, 16 bp, Artificial Sequence
  Description of Artificial Sequence: Synthetic oligonucleotide
gcaaattgagtgctaa

SEQ ID NO: 881 - DNA, 16 bp, Artificial Sequence
  Description of Artificial Sequence: Synthetic oligonucleotide
aaacactattgccgca

SEQ ID NO: 882 - DNA, 16 bp, Artificial Sequence
  Description of Artificial Sequence: Synthetic oligonucleotide
gtgtgaagcaaagtgt

SEQ ID NO: 883 - DNA, 16 bp, Artificial Sequence
  Description of Artificial Sequence: Synthetic oligonucleotide
aaactacattcttggt

SEQ ID NO: 884 - DNA, 16 bp, Artificial Sequence
  Description of Artificial Sequence: Synthetic oligonucleotide
agaagtgaataggaca

SEQ ID NO: 885 - DNA, 16 bp, Artificial Sequence
  Description of Artificial Sequence: Synthetic oligonucleotide
tgaatgggtgatttag

SEQ ID NO: 886 - DNA, 16 bp, Artificial Sequence
  Description of Artificial Sequence: Synthetic oligonucleotide
gaatgggtgatttaga

SEQ ID NO: 887 - DNA, 16 bp, Artificial Sequence
  Description of Artificial Sequence: Synthetic oligonucleotide
aaactgtataattacc

SEQ ID NO: 888 - DNA, 16 bp, Artificial Sequence
  Description of Artificial Sequence: Synthetic oligonucleotide
cccaatttaggttcct

SEQ ID NO: 889 - DNA, 16 bp, Artificial Sequence
  Description of Artificial Sequence: Synthetic oligonucleotide
acccatatgatgccgt

SEQ ID NO: 890 - DNA, 16 bp, Artificial Sequence
  Description of Artificial Sequence: Synthetic oligonucleotide
caagctggttcaatct

SEQ ID NO: 891 - DNA, 16 bp, Artificial Sequence
  Description of Artificial Sequence: Synthetic oligonucleotide
gctggttcaatctgtc

SEQ ID NO: 892 - DNA, 16 bp, Artificial Sequence
  Description of Artificial Sequence: Synthetic oligonucleotide
ccttgtctgattagtt

SEQ ID NO: 893 - DNA, 16 bp, Artificial Sequence
  Description of Artificial Sequence: Synthetic oligonucleotide
cttgtctgattagttc

SEQ ID NO: 894 - DNA, 16 bp, Artificial Sequence
  Description of Artificial Sequence: Synthetic oligonucleotide
aatgacttgatctttg

SEQ ID NO: 895 - RNA, 20 nt, Mus sp.
ucccgcauggugguuucuuu

SEQ ID NO: 896 - RNA, 20 nt, Mus sp.
uaccacagugacucauguuc

SEQ ID NO: 897 - RNA, 20 nt, Mus sp.
ugagcucaggcaacguugac

SEQ ID NO: 898 - RNA, 20 nt, Homo sapiens
ucuucaaaagcagugguuuc

SEQ ID NO: 899 - RNA, 20 nt, Mus sp.
ugugagcucaggcaacguug

SEQ ID NO: 900 - RNA, 20 nt, Homo sapiens
accacagugaugccuguucu

SEQ ID NO: 901 - RNA, 20 nt, Homo sapiens
ccggcaaugucgauaucuau

SEQ ID NO: 902 - RNA, 20 nt, Homo sapiens
agugccggcaaugucgauau

SEQ ID NO: 903 - RNA, 20 nt, Mus sp.
aaagacaugggauacaagaa

SEQ ID NO: 904 - RNA, 20 nt, Homo sapiens
uuuacucuagccaaggaaua

SEQ ID NO: 905 - RNA, 20 nt, Mus sp.
gcuucauccuccagguuuac

SEQ ID NO: 906 - RNA, 20 nt, Mus sp.
acggacaaagcuucauccuc

SEQ ID NO: 907 - RNA, 20 nt, Mus sp.
ugggucuucaggcacaugca

SEQ ID NO: 908 - RNA, 20 nt, Mus sp.
ucugggacagcaacuguucu

SEQ ID NO: 909 - RNA, 20 nt, Homo sapiens
accugcaucaaccccucuaa

SEQ ID NO: 910 - RNA, 20 nt, Mus sp.
cuugcuuuggagguucuggg

SEQ ID NO: 911 - RNA, 20 nt, Homo sapiens
augggcagcaagugcuccaa

SEQ ID NO: 912 - RNA, 20 nt, Mus sp.
uaagaaaucgcuguguuuag

SEQ ID NO: 913 - RNA, 20 nt, Mus sp.
cucaaagucuaagaaaucgc

SEQ ID NO: 914 - RNA, 20 nt, Homo sapiens
uaagaaagcacugugcauca

SEQ ID NO: 915 - RNA, 20 nt, Mus sp.
cucaacaucugucauccaca

SEQ ID NO: 916 - RNA, 20 nt, Homo sapiens
aucaugcaaauaaauuaugc

SEQ ID NO: 917 - RNA, 20 nt, Homo sapiens
uaucaugcaaauaaauuaug

SEQ ID NO: 918 - RNA, 20 nt, Homo sapiens
gugaaaaugaauaucaugca

SEQ ID NO: 919 - RNA, 20 nt, Homo sapiens
uugugaaaaugaauaucaug

SEQ ID NO: 920 - RNA, 20 nt, Homo sapiens
uucaauugugaaaaugaaua

SEQ ID NO: 921 - RNA, 20 nt, Homo sapiens
guucaauugugaaaaugaau

SEQ ID NO: 922 - RNA, 20 nt, Homo sapiens
uguaaaguucaauugugaaa

SEQ ID NO: 923 - RNA, 20 nt, Homo sapiens
aacuguaaaguucaauugug

SEQ ID NO: 924 - RNA, 20 nt, Homo sapiens
uuaaacuguaaaguucaauu

SEQ ID NO: 925 - RNA, 20 nt, Homo sapiens
uuuaaacuguaaaguucaau

SEQ ID NO: 926 - RNA, 20 nt, Homo sapiens
gugaacaacuguuugucuuu

SEQ ID NO: 927 - RNA, 20 nt, Homo sapiens
augugaacaacuguuugucu

SEQ ID NO: 928 - RNA, 20 nt, Homo sapiens
uaugugaacaacuguuuguc

SEQ ID NO: 929 - RNA, 20 nt, Homo sapiens
uuaugugaacaacuguuugu

SEQ ID NO: 930 - RNA, 20 nt, Homo sapiens
auuuaugugaacaacuguuu

SEQ ID NO: 931 - RNA, 20 nt, Mus sp.
aaauauaugaauaaaguaua

SEQ ID NO: 932 - RNA, 20 nt, Homo sapiens
ucuuauuuaugugaacaacu

SEQ ID NO: 933 - RNA, 20 nt, Homo sapiens
auugccccuucuuauuuaug

SEQ ID NO: 934 - RNA, 20 nt, Mus sp.
gauuccacugugaaauauau

SEQ ID NO: 935 - RNA, 20 nt, Mus sp.
ucugagcugugagauuccac

SEQ ID NO: 936 - RNA, 20 nt, Mus sp.
ugugucuguucugagcugug

SEQ ID NO: 937 - RNA, 20 nt, Homo sapiens
uaauggugaaaacgucuucc

SEQ ID NO: 938 - RNA, 20 nt, Homo sapiens
guaauggugaaaacgucuuc

SEQ ID NO: 939 - RNA, 20 nt, Mus sp.
ccugcuuugugucuguucug

SEQ ID NO: 940 - RNA, 20 nt, Mus sp.
uugguuauuuccugcuuugu

SEQ ID NO: 941 - RNA, 20 nt, Homo sapiens
acauccuaaaagguguugua

SEQ ID NO: 942 - RNA, 20 nt, Homo sapiens
cugugcacaugccucuguag

SEQ ID NO: 943 - RNA, 20 nt, Mus sp.
gcuguaagguaccuacauac

SEQ ID NO: 944 - RNA, 20 nt, Homo sapiens
uuugcaggaucugucugugc

SEQ ID NO: 945 - RNA, 20 nt, Homo sapiens
aaucccauuugcaggaucug

SEQ ID NO: 946 - RNA, 20 nt, Mus sp.
gggaccuucuuagaugcugu

SEQ ID NO: 947 - RNA, 20 nt, Mus sp.
ugggaccuucuuagaugcug

SEQ ID NO: 948 - RNA, 20 nt, Homo sapiens
uggaaagucaugcaauccca

SEQ ID NO: 949 - RNA, 20 nt, Homo sapiens
ccuugaaauggaaagucaug

SEQ ID NO: 950 - RNA, 20 nt, Homo sapiens
uacagcuaggacuuaaccuu

SEQ ID NO: 951 - RNA, 20 nt, Homo sapiens
uucuacagcuaggacuuaac

SEQ ID NO: 952 - RNA, 20 nt, Homo sapiens
ugaaugauucuacagcuagg

SEQ ID NO: 953 - RNA, 20 nt, Homo sapiens
guuugcaagaaugaaaugaa

SEQ ID NO: 954 - RNA, 20 nt, Homo sapiens
ccaagcaggcugguuugcaa

SEQ ID NO: 955 - RNA, 20 nt, Mus sp.
ugggucauaacugggacucc

SEQ ID NO: 956 - RNA, 20 nt, Mus sp.
accaaauaugaaguaugaau

SEQ ID NO: 957 - RNA, 20 nt, Mus sp.
auuaccaaauaugaaguaug

SEQ ID NO: 958 - RNA, 20 nt, Homo sapiens
uguggucccuuccaaugcug

SEQ ID NO: 959 - RNA, 20 nt, Mus sp.
gccagaauuaccaaauauga

SEQ ID NO: 960 - RNA, 20 nt, Mus sp.
ugccagaauuaccaaauaug

SEQ ID NO: 961 - RNA, 20 nt, Mus sp.
caugccagaauuaccaaaua

SEQ ID NO: 962 - RNA, 20 nt, Mus sp.
aaagccaugccagaauuacc

SEQ ID NO: 963 - RNA, 20 nt, Mus sp.
uauaccaggaaagccaugcc

SEQ ID NO: 964 - RNA, 20 nt, Homo sapiens
gaagaagagaaagauguguu

SEQ ID NO: 965 - RNA, 20 nt, Homo sapiens
cggcgaagaagagaaagaug

SEQ ID NO: 966 - RNA, 20 nt, Mus sp.
agagaggagaucauugucuu

SEQ ID NO: 967 - RNA, 20 nt, Mus sp.
ucagauaaagaugaaagaga

SEQ ID NO: 968 - RNA, 20 nt, Mus sp.
ccuagcuucagauaaagaug

SEQ ID NO: 969 - RNA, 20 nt, Homo sapiens
cuccugacuuaacguucuau

SEQ ID NO: 970 - RNA, 20 nt, Homo sapiens
gcuccugacuuaacguucua

SEQ ID NO: 971 - RNA, 20 nt, Homo sapiens
ggcuccugacuuaacguucu

SEQ ID NO: 972 - RNA, 20 nt, Mus sp.
auuagaaguuccuagcuuca

SEQ ID NO: 973 - RNA, 20 nt, Mus sp.
aaugagauuagaaguuccua

SEQ ID NO: 974 - RNA, 20 nt, Mus sp.
gcaaugagauuagaaguucc

SEQ ID NO: 975 - RNA, 20 nt, Homo sapiens
ugacaaaaugacuggcuccu

SEQ ID NO: 976 - RNA, 20 nt, Homo sapiens
uuugacaaaaugacuggcuc

SEQ ID NO: 977 - RNA, 20 nt, Mus sp.
uagguuguucuguagacugg

SEQ ID NO: 978 - RNA, 20 nt, Mus sp.
uuagguuguucuguagacug

SEQ ID NO: 979 - RNA, 20 nt, Mus sp.
uuccagaugguuagguuguu

SEQ ID NO: 980 - RNA, 20 nt, Homo sapiens
aucaucuuugccaaguaaga

SEQ ID NO: 981 - RNA, 20 nt, Mus sp.
ucagacacuagaccucuucc

SEQ ID NO: 982 - RNA, 20 nt, Homo sapiens
ugaaacuguaucaucuuugc

SEQ ID NO: 983 - RNA, 20 nt, Homo sapiens
uuugaaacuguaucaucuuu

SEQ ID NO: 984 - RNA, 20 nt, Homo sapiens
aacucuuugaaacuguauca

SEQ ID NO: 985 - RNA, 20 nt, Mus sp.
uuggacugugugauugugcc

SEQ ID NO: 986 - RNA, 20 nt, Homo sapiens
ccaccuucauuuaacucuuu

SEQ ID NO: 987 - RNA, 20 nt, Homo sapiens
uaguccaccuucauuuaacu

SEQ ID NO: 988 - RNA, 20 nt, Homo sapiens
uuugaugucuccaaguaguc

SEQ ID NO: 989 - RNA, 20 nt, Homo sapiens
uuagcuuuugaugucuccaa

SEQ ID NO: 990 - RNA, 20 nt, Homo sapiens
ccuggaaacuuagcuuuuga

SEQ ID NO: 991 - RNA, 20 nt, Mus sp.
uacuaccucacugcaccugg

SEQ ID NO: 992 - RNA, 20 nt, Mus sp.
ucuggguuguguuucuucuc

SEQ ID NO: 993 - RNA, 20 nt, Homo sapiens
uuuccauguuauguuucuac

SEQ ID NO: 994 - RNA, 20 nt, Homo sapiens
uacacuguuuccauguuaug

SEQ ID NO: 995 - RNA, 20 nt, Homo sapiens
guuuaagguacacuguuucc

SEQ ID NO: 996 - RNA, 20 nt, Homo sapiens
aguuuaagguacacuguuuc

SEQ ID NO: 997 - RNA, 20 nt, Mus sp.
aucagaaucagggacuugug

SEQ ID NO: 998 - RNA, 20 nt, Homo sapiens
ggggaaaucaaggaugcuca

SEQ ID NO: 999 - RNA, 20 nt, Mus sp.
agguccaucagaaucaggga

SEQ ID NO: 1000 - RNA, 20 nt, Mus sp.
ucagguccaucagaaucagg

SEQ ID NO: 1001 - RNA, 20 nt, Mus sp.
uggagccuguauagcucagc

SEQ ID NO: 1002 - RNA, 20 nt, Mus sp.
acaggcauggccuaguaccu

SEQ ID NO: 1003 - RNA, 20 nt, Mus sp.
ccugaaacuuaccucuuagc

SEQ ID NO: 1004 - RNA, 20 nt, Mus sp.
ucucagagccugaaacuuac

SEQ ID NO: 1005 - RNA, 20 nt, Mus sp.
ugggugagcucuacauggug

SEQ ID NO: 1006 - RNA, 20 nt, Mus sp.
agagcaagaagcuaaugccg

SEQ ID NO: 1007 - RNA, 20 nt, Mus sp.
uucccaagcuaagggccuag

SEQ ID NO: 1008 - RNA, 20 nt, Homo sapiens
auagacagugcccuuggugc

SEQ ID NO: 1009 - RNA, 20 nt, Homo sapiens
ggugacgugguagucacuug

SEQ ID NO: 1010 - RNA, 20 nt, Mus sp.
ugggcuggucauacugucau

SEQ ID NO: 1011 - RNA, 20 nt, Mus sp.
guugggcuggucauacuguc

SEQ ID NO: 1012 - RNA, 20 nt, Mus sp.
ugaguaaccugaugaccuga

SEQ ID NO: 1013 - RNA, 20 nt, Mus sp.
gaccucugaguaaccugaug

SEQ ID NO: 1014 - RNA, 20 nt, Mus sp.
uggaucacuaaggacuauga

SEQ ID NO: 1015 - RNA, 20 nt, Mus sp.
uuggaucacuaaggacuaug

SEQ ID NO: 1016 - RNA, 20 nt, Mus sp.
acucucauguuggaacuucu

SEQ ID NO: 1017 - RNA, 20 nt, Homo sapiens
cuuuccaggggccaauuuug

SEQ ID NO: 1018 - RNA, 20 nt, Homo sapiens
accaccagcuauuggaccuu

SEQ ID NO: 1019 - RNA, 20 nt, Homo sapiens
ugccccauugagaucuuccu

SEQ ID NO: 1020 - RNA, 20 nt, Mus sp.
gaugaccagauucuguuggg

SEQ ID NO: 1021 - RNA, 20 nt, Mus sp.
cccaccagaauggaugacca

SEQ ID NO: 1022 - RNA, 20 nt, Mus sp.
uucacuuuuauuaaacagug

SEQ ID NO: 1023 - RNA, 20 nt, Mus sp.
uuucacuuuuauuaaacagu

SEQ ID NO: 1024 - RNA, 20 nt, Mus sp.
cgaagggccuuucacuuuua

SEQ ID NO: 1025 - RNA, 20 nt, Mus sp.
uuugagaugauucgaagggc

SEQ ID NO: 1026 - RNA, 20 nt, Mus sp.
uguaccuuuugagaugauuc

SEQ ID NO: 1027 - RNA, 20 nt, Mus sp.
gugcacaauguaccuuuuga

SEQ ID NO: 1028 - RNA, 20 nt, Mus sp.
cugugcacaauguaccuuuu

SEQ ID NO: 1029 - RNA, 20 nt, Mus sp.
ccugaauuuuaacuuccugu

SEQ ID NO: 1030 - RNA, 20 nt, Homo sapiens
uaaacagugaacuugucugg

SEQ ID NO: 1031 - RNA, 20 nt, Homo sapiens
uuaaacagugaacuugucug

SEQ ID NO: 1032 - RNA, 20 nt, Mus sp.
agggccugaauuuuaacuuc

SEQ ID NO: 1033 - RNA, 20 nt, Mus sp.
aagggccugaauuuuaacuu

SEQ ID NO: 1034 - RNA, 20 nt, Mus sp.
caagaaaaccaagggccuga

SEQ ID NO: 1035 - RNA, 20 nt, Mus sp.
ugcaagaaaaccaagggccu

SEQ ID NO: 1036 - RNA, 20 nt, Mus sp.
cugcaagaaaaccaagggcc

SEQ ID NO: 1037 - RNA, 20 nt, Mus sp.
uucugcaagaaaaccaaggg

SEQ ID NO: 1038 - RNA, 20 nt, Homo sapiens
auucagaggucacuucauuu

SEQ ID NO: 1039 - RNA, 20 nt, Homo sapiens
ugauucagaggucacuucau

SEQ ID NO: 1040 - RNA, 20 nt, Homo sapiens
uuagagaugauucagagguc

SEQ ID NO: 1041 - RNA, 20 nt, Homo sapiens
uuuacucuuagagaugauuc

SEQ ID NO: 1042 - RNA, 20 nt, Mus sp.
ugucccagacuuccuuuguc

SEQ ID NO: 1043 - RNA, 20 nt, Homo sapiens
ccgugcaugauuuacucuua

SEQ ID NO: 1044 - RNA, 20 nt, Mus sp.
ggcuuugucccagacuuccu

SEQ ID NO: 1045 - RNA, 20 nt, Homo sapiens
uuccccgugcaugauuuacu

SEQ ID NO: 1046 - RNA, 20 nt, Homo sapiens
uuacaagaaaacaauggggc

SEQ ID NO: 1047 - RNA, 20 nt, Homo sapiens
uuuacaagaaaacaaugggg

SEQ ID NO: 1048 - RNA, 20 nt, Homo sapiens
uuuuacaagaaaacaauggg

SEQ ID NO: 1049 - RNA, 20 nt, Homo sapiens
uucguccuugacgucguuuu

SEQ ID NO: 1050 - RNA, 20 nt, Mus sp.
acgguauuuacagauuggau

SEQ ID NO: 1051 - RNA, 20 nt, Mus sp.
gacgguauuuacagauugga

SEQ ID NO: 1052 - RNA, 20 nt, Mus sp.
acgggaacgugacgguauuu

SEQ ID NO: 1053 - RNA, 20 nt, Homo sapiens
augguauucacggacuggau

SEQ ID NO: 1054 - RNA, 20 nt, Homo sapiens
gaugguauucacggacugga

SEQ ID NO: 1055 - RNA, 20 nt, Homo sapiens
gggaaugugaugguauucac

SEQ ID NO: 1056 - RNA, 20 nt, Homo sapiens
acgggaaugugaugguauuc

SEQ ID NO: 1057 - RNA, 20 nt, Homo sapiens
guugauaacagcaagauggc

SEQ ID NO: 1058 - RNA, 20 nt, Homo sapiens
cuguugauaacagcaagaug

SEQ ID NO: 1059 - RNA, 20 nt, Homo sapiens
ucuggcugugccaaagcuua

SEQ ID NO: 1060 - RNA, 20 nt, Mus sp.
gguuacuuugaagaauggga

SEQ ID NO: 1061 - RNA, 20 nt, Mus sp.
uguaauaguaaauacauaua

SEQ ID NO: 1062 - RNA, 20 nt, Mus sp.
ccaaauguaauaguaaauac

SEQ ID NO: 1063 - RNA, 20 nt, Mus sp.
cuccaaauguaauaguaaau

SEQ ID NO: 1064 - RNA, 20 nt, Mus sp.
cgagcccuccaaauguaaua

SEQ ID NO: 1065 - RNA, 20 nt, Mus sp.
gaucgagcccuccaaaugua

SEQ ID NO: 1066 - RNA, 20 nt, Homo sapiens
augucuaugacaaccugauc

SEQ ID NO: 1067 - RNA, 20 nt, Mus sp.
ucggacguguugaaugcugc

SEQ ID NO: 1068 - RNA, 20 nt, Homo sapiens
aacagcagauaugucuauga

SEQ ID NO: 1069 - RNA, 20 nt, Mus sp.
cucggacguguugaaugcug

SEQ ID NO: 1070 - RNA, 20 nt, Homo sapiens
agaugcaacagcagauaugu

SEQ ID NO: 1071 - RNA, 20 nt, Mus sp.
ugagaaagggaagaccucgg

SEQ ID NO: 1072 - RNA, 20 nt, Homo sapiens
auaccuaucauuacucgaug

SEQ ID NO: 1073 - RNA, 20 nt, Homo sapiens
ucagaagugcugaacgcugc

SEQ ID NO: 1074 - RNA, 20 nt, Homo sapiens
cucagaagugcugaacgcug

SEQ ID NO: 1075 - RNA, 20 nt, Homo sapiens
ccagauaccuaucauuacuc

SEQ ID NO: 1076 - RNA, 20 nt, Homo sapiens
uccagauaccuaucauuacu

SEQ ID NO: 1077 - RNA, 20 nt, Mus sp.
uuggcuuuuaaugaucuagu

SEQ ID NO: 1078 - RNA, 20 nt, Mus sp.
ugaagcugcagacaccuuug

SEQ ID NO: 1079 - RNA, 20 nt, Mus sp.
aacgacauugcucucaugaa

SEQ ID NO: 1080 - RNA, 20 nt, Homo sapiens
gcagaagccucugacuuuca

SEQ ID NO: 1081 - RNA, 20 nt, Mus sp.
uucccauccaaauuacgacu

SEQ ID NO: 1082 - RNA, 20 nt, Mus sp.
ggaaguagacaccagguaga

SEQ ID NO: 1083 - RNA, 20 nt, Mus sp.
uggaaguagacaccagguag

SEQ ID NO: 1084 - RNA, 20 nt, Mus sp.
uguucuauggaaguagacac

SEQ ID NO: 1085 - RNA, 20 nt, Homo sapiens
uaugacuccaagaccaagaa

SEQ ID NO: 1086 - RNA, 20 nt, Homo sapiens
uucucauccaaauuaugacu

SEQ ID NO: 1087 - RNA, 20 nt, Mus sp.
ugagacagucucucauguuc

SEQ ID NO: 1088 - RNA, 20 nt, Mus sp.
cugagacagucucucauguu

SEQ ID NO: 1089 - RNA, 20 nt, Mus sp.
ugcgggaauucugagacagu

SEQ ID NO: 1090 - RNA, 20 nt, Homo sapiens
caggucauauugaacauucc

SEQ ID NO: 1091 - RNA, 20 nt, Homo sapiens
gagacaaucuuucauguucu

SEQ ID NO: 1092 - RNA, 20 nt, Homo sapiens
cgcggcaggucauauugaac

SEQ ID NO: 1093 - RNA, 20 nt, Homo sapiens
auggcauuggacggcauuug

SEQ ID NO: 1094 - RNA, 20 nt, Homo sapiens
cauggcauuggacggcauuu

SEQ ID NO: 1095 - DNA, 45 bp, Mus sp.
agtgactcatgttcatcccgcatggtggtttctttgcgctgtata

SEQ ID NO: 1096 - DNA, 45 bp, Mus sp.
ctctataaaaaactctaccacagtgactcatgttcatcccgcatg

SEQ ID NO: 1097 - DNA, 45 bp, Mus sp.
ttatgaagctgaatgtgagctcaggcaacgttgacctctataaaa

SEQ ID NO: 1098 - DNA, 45 bp, Homo sapiens
cacagtgatgcctgttcttcaaaagcagtggtttctttacgctgt

SEQ ID NO: 1099 - DNA, 45 bp, Mus sp.
ctttatgaagctgaatgtgagctcaggcaacgttgacctctataa

SEQ ID NO: 1100 - DNA, 45 bp, Homo sapiens
tctataaaaaactgtaccacagtgatgcctgttcttcaaaagcag

SEQ ID NO: 1101 - DNA, 45 bp, Homo sapiens
aactgaacacaagtgccggcaatgtcgatatctataaaaaactgt

SEQ ID NO: 1102 - DNA, 45 bp, Homo sapiens
atgaaactgaacacaagtgccggcaatgtcgatatctataaaaaa

SEQ ID NO: 1103 - DNA, 45 bp, Mus sp.
gggagagcagcatgtaaagacatgggatacaagaacaatttttat

SEQ ID NO: 1104 - DNA, 45 bp, Homo sapiens
gctataagaataatttttactctagccaaggaatagtggatgaca

SEQ ID NO: 1105 - DNA, 45 bp, Mus sp.
gtctctacggacaaagcttcatcctccaggtttactcatctcaga

SEQ ID NO: 1106 - DNA, 45 bp, Mus sp.
gttgtgttcgtctctacggacaaagcttcatcctccaggtttact

SEQ ID NO: 1107 - DNA, 45 bp, Mus sp.
gtctgagatggagtgtgggtcttcaggcacatgcatcagctcttc

SEQ ID NO: 1108 - DNA, 45 bp, Mus sp.
tcttgctttggaggttctgggacagcaactgttctacgtctgaga

SEQ ID NO: 1109 - DNA, 45 bp, Homo sapiens
tgcgactcctcaggtacctgcatcaacccctctaactggtgtgat

SEQ ID NO: 1110 - DNA, 45 bp, Mus sp.
tgctgtggctgctgtcttgctttggaggttctgggacagcaactg

SEQ ID NO: 1111 - DNA, 45 bp, Homo sapiens
ctactctggaagttcatgggcagcaagtgctccaactctgggata

SEQ ID NO: 1112 - DNA, 45 bp, Mus sp.
gtgcacctcaaagtctaagaaatcgctgtgtttagccctcgccct

SEQ ID NO: 1113 - DNA, 45 bp, Mus sp.
aggagcactgtgcacctcaaagtctaagaaatcgctgtgtttagc

SEQ ID NO: 1114 - DNA, 45 bp, Homo sapiens
gtgcacctcaaagactaagaaagcactgtgcatcaccttgaccct

SEQ ID NO: 1115 - DNA, 45 bp, Mus sp.
gattacaacgcaagcctcaacatctgtcatccacacacatcccaa

SEQ ID NO: 1116 - DNA, 45 bp, Homo sapiens
attgtgaaaatgaatatcatgcaaataaattatgcaatttttttt

SEQ ID NO: 1117 - DNA, 45 bp, Homo sapiens
aattgtgaaaatgaatatcatgcaaataaattatgcaattttttt

SEQ ID NO: 1118 - DNA, 45 bp, Homo sapiens
ctgtaaagttcaattgtgaaaatgaatatcatgcaaataaattat

SEQ ID NO: 1119 - DNA, 45 bp, Homo sapiens
aactgtaaagttcaattgtgaaaatgaatatcatgcaaataaatt

SEQ ID NO: 1120 - DNA, 45 bp, Homo sapiens
ttttaaactgtaaagttcaattgtgaaaatgaatatcatgcaaat

SEQ ID NO: 1121 - DNA, 45 bp, Homo sapiens
tttttaaactgtaaagttcaattgtgaaaatgaatatcatgcaaa

SEQ ID NO: 1122 - DNA, 45 bp, Homo sapiens
gtatcttttttaaactgtaaagttcaattgtgaaaatgaatatca

SEQ ID NO: 1123 - DNA, 45 bp, Homo sapiens
tttgtatcttttttaaactgtaaagttcaattgtgaaaatgaata

SEQ ID NO: 1124 - DNA, 45 bp, Homo sapiens
ttttttgtatcttttttaaactgtaaagttcaattgtgaaaatga

SEQ ID NO: 1125 - DNA, 45 bp, Homo sapiens
tttttttgtatcttttttaaactgtaaagttcaattgtgaaaatg

SEQ ID NO: 1126 - DNA, 45 bp, Homo sapiens
ccccttcttatttatgtgaacaactgtttgtctttttttgtatct

SEQ ID NO: 1127 - DNA, 45 bp, Homo sapiens
tgccccttcttatttatgtgaacaactgtttgtctttttttgtat

SEQ ID NO: 1128 - DNA, 45 bp, Homo sapiens
ttgccccttcttatttatgtgaacaactgtttgtctttttttgta

SEQ ID NO: 1129 - DNA, 45 bp, Homo sapiens
attgccccttcttatttatgtgaacaactgtttgtctttttttgt

SEQ ID NO: 1130 - DNA, 45 bp, Homo sapiens
ttattgccccttcttatttatgtgaacaactgtttgtcttttttt

SEQ ID NO: 1131 - DNA, 45 bp, Mus sp.
tgagattccactgtgaaatatatgaataaagtatataattctttt

SEQ ID NO: 1132 - DNA, 45 bp, Homo sapiens
ttctttattgccccttcttatttatgtgaacaactgtttgtcttt

SEQ ID NO: 1133 - DNA, 45 bp, Homo sapiens
acgtcttccttctttattgccccttcttatttatgtgaacaactg

SEQ ID NO: 1134 - DNA, 45 bp, Mus sp.
tgttctgagctgtgagattccactgtgaaatatatgaataaagta

SEQ ID NO: 1135 - DNA, 45 bp, Mus sp.
ctgctttgtgtctgttctgagctgtgagattccactgtgaaatat

SEQ ID NO: 1136 - DNA, 45 bp, Mus sp.
ggttatttcctgctttgtgtctgttctgagctgtgagattccact

SEQ ID NO: 1137 - DNA, 45 bp, Homo sapiens
tcctaaaaggtgttgtaatggtgaaaacgtcttccttctttattg

SEQ ID NO: 1138 - DNA, 45 bp, Homo sapiens
atcctaaaaggtgttgtaatggtgaaaacgtcttccttctttatt

SEQ ID NO: 1139 - DNA, 45 bp, Mus sp.
gttggttggttatttcctgctttgtgtctgttctgagctgtgaga

SEQ ID NO: 1140 - DNA, 45 bp, Mus sp.
tgtctttgctgttggttggttatttcctgctttgtgtctgttctg

SEQ ID NO: 1141 - DNA, 45 bp, Homo sapiens
cttgctccccaagacacatcctaaaaggtgttgtaatggtgaaaa

SEQ ID NO: 1142 - DNA, 45 bp, Homo sapiens
atttgcaggatctgtctgtgcacatgcctctgtagagagcagcat

SEQ ID NO: 1143 - DNA, 45 bp, Mus sp.
gggaccttcttagatgctgtaaggtacctacatacagactaaatg

SEQ ID NO: 1144 - DNA, 45 bp, Homo sapiens
agtcatgcaatcccatttgcaggatctgtctgtgcacatgcctct

SEQ ID NO: 1145 - DNA, 45 bp, Homo sapiens
aatggaaagtcatgcaatcccatttgcaggatctgtctgtgcaca

SEQ ID NO: 1146 - DNA, 45 bp, Mus sp.
cctcatgcgtcctctgggaccttcttagatgctgtaaggtaccta

SEQ ID NO: 1147 - DNA, 45 bp, Mus sp.
ccctcatgcgtcctctgggaccttcttagatgctgtaaggtacct

SEQ ID NO: 1148 - DNA, 45 bp, Homo sapiens
gacttaaccttgaaatggaaagtcatgcaatcccatttgcaggat

SEQ ID NO: 1149 - DNA, 45 bp, Homo sapiens
acagctaggacttaaccttgaaatggaaagtcatgcaatcccatt

SEQ ID NO: 1150 - DNA, 45 bp, Homo sapiens
tgaaatgaatgattctacagctaggacttaaccttgaaatggaaa

SEQ ID NO: 1151 - DNA, 45 bp, Homo sapiens
gaatgaaatgaatgattctacagctaggacttaaccttgaaatgg

SEQ ID NO: 1152 - DNA, 45 bp, Homo sapiens
tttgcaagaatgaaatgaatgattctacagctaggacttaacctt

SEQ ID NO: 1153 - DNA, 45 bp, Homo sapiens
tggccaagcaggctggtttgcaagaatgaaatgaatgattctaca

SEQ ID NO: 1154 - DNA, 45 bp, Homo sapiens
ggttctgcctcctggccaagcaggctggtttgcaagaatgaaatg

SEQ ID NO: 1155 - DNA, 45 bp, Mus sp.
tcagaaggcagtgaatgggtcataactgggactccatctttgctg

SEQ ID NO: 1156 - DNA, 45 bp, Mus sp.
agccatgccagaattaccaaatatgaagtatgaatgtcttaccca

SEQ ID NO: 1157 - DNA, 45 bp, Mus sp.
gaaagccatgccagaattaccaaatatgaagtatgaatgtcttac

SEQ ID NO: 1158 - DNA, 45 bp, Homo sapiens
ttgttttggactctctgtggtcccttccaatgctgtgggtttcca

SEQ ID NO: 1159 - DNA, 45 bp, Mus sp.
taccaggaaagccatgccagaattaccaaatatgaagtatgaatg

SEQ ID NO: 1160 - DNA, 45 bp, Mus sp.
ataccaggaaagccatgccagaattaccaaatatgaagtatgaat

SEQ ID NO: 1161 - DNA, 45 bp, Mus sp.
ttataccaggaaagccatgccagaattaccaaatatgaagtatga

SEQ ID NO: 1162 - DNA, 45 bp, Mus sp.
tgggtttataccaggaaagccatgccagaattaccaaatatgaag

SEQ ID NO: 1163 - DNA, 45 bp, Mus sp.
ttctggccctgggtttataccaggaaagccatgccagaattacca

SEQ ID NO: 1164 - DNA, 45 bp, Homo sapiens
gcccatggtggcggcgaagaagagaaagatgtgttttgttttgga

SEQ ID NO: 1165 - DNA, 45 bp, Homo sapiens
aagtgcccatggtggcggcgaagaagagaaagatgtgttttgttt

SEQ ID NO: 1166 - DNA, 45 bp, Mus sp.
tcagataaagatgaaagagaggagatcattgtcttctgtcttctt

SEQ ID NO: 1167 - DNA, 45 bp, Mus sp.
tagaagttcctagcttcagataaagatgaaagagaggagatcatt

SEQ ID NO: 1168 - DNA, 45 bp, Mus sp.
atgagattagaagttcctagcttcagataaagatgaaagagagga

SEQ ID NO: 1169 - DNA, 45 bp, Homo sapiens
tgacaaaatgactggctcctgacttaacgttctataaatgaatgt

SEQ ID NO: 1170 - DNA, 45 bp, Homo sapiens
ttgacaaaatgactggctcctgacttaacgttctataaatgaatg

SEQ ID NO: 1171 - DNA, 45 bp, Homo sapiens
tttgacaaaatgactggctcctgacttaacgttctataaatgaat

SEQ ID NO: 1172 - DNA, 45 bp, Mus sp.
tagactggcaatgagattagaagttcctagcttcagataaagatg

SEQ ID NO: 1173 - DNA, 45 bp, Mus sp.
gttctgtagactggcaatgagattagaagttcctagcttcagata

SEQ ID NO: 1174 - DNA, 45 bp, Mus sp.
ttgttctgtagactggcaatgagattagaagttcctagcttcaga

SEQ ID NO: 1175 - DNA, 45 bp, Homo sapiens
ctatttcagctgctttgacaaaatgactggctcctgacttaacgt

SEQ ID NO: 1176 - DNA, 45 bp, Homo sapiens
gcctatttcagctgctttgacaaaatgactggctcctgacttaac

SEQ ID NO: 1177 - DNA, 45 bp, Mus sp.
cctcttccagatggttaggttgttctgtagactggcaatgagatt

SEQ ID NO: 1178 - DNA, 45 bp, Mus sp.
acctcttccagatggttaggttgttctgtagactggcaatgagat

SEQ ID NO: 1179 - DNA, 45 bp, Mus sp.
cagacactagacctcttccagatggttaggttgttctgtagactg

SEQ ID NO: 1180 - DNA, 45 bp, Homo sapiens
actctttgaaactgtatcatctttgccaagtaagagtggtggcct

SEQ ID NO: 1181 - DNA, 45 bp, Mus sp.
ctgtgtgattgtgcctcagacactagacctcttccagatggttag

SEQ ID NO: 1182 - DNA, 45 bp, Homo sapiens
cttcatttaactctttgaaactgtatcatctttgccaagtaagag

SEQ ID NO: 1183 - DNA, 45 bp, Homo sapiens
accttcatttaactctttgaaactgtatcatctttgccaagtaag

SEQ ID NO: 1184 - DNA, 45 bp, Homo sapiens
agtccaccttcatttaactctttgaaactgtatcatctttgccaa

SEQ ID NO: 1185 - DNA, 45 bp, Mus sp.
ggagttcacctgcatttggactgtgtgattgtgcctcagacacta

SEQ ID NO: 1186 - DNA, 45 bp, Homo sapiens
atgtctccaagtagtccaccttcatttaactctttgaaactgtat

SEQ ID NO: 1187 - DNA, 45 bp, Homo sapiens
tttgatgtctccaagtagtccaccttcatttaactctttgaaact

SEQ ID NO: 1188 - DNA, 45 bp, Homo sapiens
cctggaaacttagcttttgatgtctccaagtagtccaccttcatt

SEQ ID NO: 1189 - DNA, 45 bp, Homo sapiens
agtgctcctggaaacttagcttttgatgtctccaagtagtccacc

SEQ ID NO: 1190 - DNA, 45 bp, Homo sapiens
tgctacctcagtgctcctggaaacttagcttttgatgtctccaag

SEQ ID NO: 1191 - DNA, 45 bp, Mus sp.
ttgtgtttcttctcttactacctcactgcacctggacactagagt

SEQ ID NO: 1192 - DNA, 45 bp, Mus sp.
ttcagtcaccttgcttctgggttgtgtttcttctcttactacctc

SEQ ID NO: 1193 - DNA, 45 bp, Homo sapiens
gtttaaggtacactgtttccatgttatgtttctacacattgctac

SEQ ID NO: 1194 - DNA, 45 bp, Homo sapiens
atgctcagtttaaggtacactgtttccatgttatgtttctacaca

SEQ ID NO: 1195 - DNA, 45 bp, Homo sapiens
aatcaaggatgctcagtttaaggtacactgtttccatgttatgtt

SEQ ID NO: 1196 - DNA, 45 bp, Homo sapiens
aaatcaaggatgctcagtttaaggtacactgtttccatgttatgt

SEQ ID NO: 1197 - DNA, 45 bp, Mus sp.
tggaggctcaggtccatcagaatcagggacttgtgatttcagtca

SEQ ID NO: 1198 - DNA, 45 bp, Homo sapiens
aaattgaggtccatgggggaaatcaaggatgctcagtttaaggta

SEQ ID NO: 1199 - DNA, 45 bp, Mus sp.
atcaaatggaggctcaggtccatcagaatcagggacttgtgattt

SEQ ID NO: 1200 - DNA, 45 bp, Mus sp.
taatcaaatggaggctcaggtccatcagaatcagggacttgtgat

SEQ ID NO: 1201 - DNA, 45 bp, Mus sp.
tggcctagtacctgatggagcctgtatagctcagctaatcaaatg

SEQ ID NO: 1202 - DNA, 45 bp, Mus sp.
ctcttagctttggctacaggcatggcctagtacctgatggagcct

SEQ ID NO: 1203 - DNA, 45 bp, Mus sp.
ctcagcctctcagagcctgaaacttacctcttagctttggctaca

SEQ ID NO: 1204 - DNA, 45 bp, Mus sp.
ctgtttctctcagcctctcagagcctgaaacttacctcttagctt

SEQ ID NO: 1205 - DNA, 45 bp, Mus sp.
tgccggcatgtcccttgggtgagctctacatggtgttattcagtc

SEQ ID NO: 1206 - DNA, 45 bp, Mus sp.
ctaggcagatctctcagagcaagaagctaatgccggcatgtccct

SEQ ID NO: 1207 - DNA, 45 bp, Mus sp.
agggtgatggaggctttcccaagctaagggcctaggcagatctct

SEQ ID NO: 1208 - DNA, 45 bp, Homo sapiens
ttatggggtgagaatatagacagtgcccttggtgcgagggaagca

SEQ ID NO: 1209 - DNA, 45 bp, Homo sapiens
cagcccttcatgggtggtgacgtggtagtcacttgtaaggggaac

SEQ ID NO: 1210 - DNA, 45 bp, Mus sp.
atctgctgtgcaggttgggctggtcatactgtcatgatttcatta

SEQ ID NO: 1211 - DNA, 45 bp, Mus sp.
aaatctgctgtgcaggttgggctggtcatactgtcatgatttcat

SEQ ID NO: 1212 - DNA, 45 bp, Mus sp.
aaggactatgacctctgagtaacctgatgacctgagaaagagtaa

SEQ ID NO: 1213 - DNA, 45 bp, Mus sp.
atcactaaggactatgacctctgagtaacctgatgacctgagaaa

SEQ ID NO: 1214 - DNA, 45 bp, Mus sp.
tgctcaggccttttttggatcactaaggactatgacctctgagta

SEQ ID NO: 1215 - DNA, 45 bp, Mus sp.
atgctcaggccttttttggatcactaaggactatgacctctgagt

SEQ ID NO: 1216 - DNA, 45 bp, Mus sp.
gcagaggagggtggcactctcatgttggaacttcttttgggctca

SEQ ID NO: 1217 - DNA, 45 bp, Homo sapiens
tcttcctgctgagtcctttccaggggccaattttggatgagcatg

SEQ ID NO: 1218 - DNA, 45 bp, Homo sapiens
tttgaactcagggtcaccaccagctattggaccttactatgaaaa

SEQ ID NO: 1219 - DNA, 45 bp, Homo sapiens
gagaggggtggaggctgccccattgagatcttcctgctgagtcct

SEQ ID NO: 1220 - DNA, 45 bp, Mus sp.
gctcccaccagaatggatgaccagattctgttgggtttgggcaca

SEQ ID NO: 1221 - DNA, 45 bp, Mus sp.
gccacttctgcagctcccaccagaatggatgaccagattctgttg

SEQ ID NO: 1222 - DNA, 45 bp, Mus sp.
tgattcgaagggcctttcacttttattaaacagtgacttgtttga

SEQ ID NO: 1223 - DNA, 45 bp, Mus sp.
atgattcgaagggcctttcacttttattaaacagtgacttgtttg

SEQ ID NO: 1224 - DNA, 45 bp, Mus sp.
ccttttgagatgattcgaagggcctttcacttttattaaacagtg

SEQ ID NO: 1225 - DNA, 45 bp, Mus sp.
gtgcacaatgtaccttttgagatgattcgaagggcctttcacttt

SEQ ID NO: 1226 - DNA, 45 bp, Mus sp.
acttcctgtgcacaatgtaccttttgagatgattcgaagggcctt

SEQ ID NO: 1227 - DNA, 45 bp, Mus sp.
gaattttaacttcctgtgcacaatgtaccttttgagatgattcga

SEQ ID NO: 1228 - DNA, 45 bp, Mus sp.
ctgaattttaacttcctgtgcacaatgtaccttttgagatgattc

SEQ ID NO: 1229 - DNA, 45 bp, Mus sp.
caagaaaaccaagggcctgaattttaacttcctgtgcacaatgta

SEQ ID NO: 1230 - DNA, 45 bp, Homo sapiens
tcacttcatttttattaaacagtgaacttgtctggctttggcact

SEQ ID NO: 1231 - DNA, 45 bp, Homo sapiens
gtcacttcatttttattaaacagtgaacttgtctggctttggcac

SEQ ID NO: 1232 - DNA, 45 bp, Mus sp.
tctgcaagaaaaccaagggcctgaattttaacttcctgtgcacaa

SEQ ID NO: 1233 - DNA, 45 bp, Mus sp.
ttctgcaagaaaaccaagggcctgaattttaacttcctgtgcaca

SEQ ID NO: 1234 - DNA, 45 bp, Mus sp.
ttcaacaaccttctgcaagaaaaccaagggcctgaattttaactt

SEQ ID NO: 1235 - DNA, 45 bp, Mus sp.
tcttcaacaaccttctgcaagaaaaccaagggcctgaattttaac

SEQ ID NO: 1236 - DNA, 45 bp, Mus sp.
gtcttcaacaaccttctgcaagaaaaccaagggcctgaattttaa

SEQ ID NO: 1237 - DNA, 45 bp, Mus sp.
ttgtcttcaacaaccttctgcaagaaaaccaagggcctgaatttt

SEQ ID NO: 1238 - DNA, 45 bp, Homo sapiens
ttactcttagagatgattcagaggtcacttcatttttattaaaca

SEQ ID NO: 1239 - DNA, 45 bp, Homo sapiens
atttactcttagagatgattcagaggtcacttcatttttattaaa

SEQ ID NO: 1240 - DNA, 45 bp, Homo sapiens
gtgcatgatttactcttagagatgattcagaggtcacttcatttt

SEQ ID NO: 1241 - DNA, 45 bp, Homo sapiens
cttccccgtgcatgatttactcttagagatgattcagaggtcact

SEQ ID NO: 1242 - DNA, 45 bp, Mus sp.
taatccacgtggctttgtcccagacttcctttgtcttcaacaacc

SEQ ID NO: 1243 - DNA, 45 bp, Homo sapiens
gctggttttgcttccccgtgcatgatttactcttagagatgattc

SEQ ID NO: 1244 - DNA, 45 bp, Mus sp.
acagctaatccacgtggctttgtcccagacttcctttgtcttcaa

SEQ ID NO: 1245 - DNA, 45 bp, Homo sapiens
tggggctggttttgcttccccgtgcatgatttactcttagagatg

SEQ ID NO: 1246 - DNA, 45 bp, Homo sapiens
gtccttgacgtcgttttacaagaaaacaatggggctggttttgct

SEQ ID NO: 1247 - DNA, 45 bp, Homo sapiens
cgtccttgacgtcgttttacaagaaaacaatggggctggttttgc

SEQ ID NO: 1248 - DNA, 45 bp, Homo sapiens
tcgtccttgacgtcgttttacaagaaaacaatggggctggttttg

SEQ ID NO: 1249 - DNA, 45 bp, Homo sapiens
ctaatccacatggtcttcgtccttgacgtcgttttacaagaaaac

SEQ ID NO: 1250 - DNA, 45 bp, Mus sp.
gtatacgggaacgtgacggtatttacagattggatctaccagcaa

SEQ ID NO: 1251 - DNA, 45 bp, Mus sp.
agtatacgggaacgtgacggtatttacagattggatctaccagca

SEQ ID NO: 1252 - DNA, 45 bp, Mus sp.
tcagacctggagtatacgggaacgtgacggtatttacagattgga

SEQ ID NO: 1253 - DNA, 45 bp, Homo sapiens
gtgtacgggaatgtgatggtattcacggactggatttatcgacaa

SEQ ID NO: 1254 - DNA, 45 bp, Homo sapiens
agtgtacgggaatgtgatggtattcacggactggatttatcgaca

SEQ ID NO: 1255 - DNA, 45 bp, Homo sapiens
agaccaggagtgtacgggaatgtgatggtattcacggactggatt

SEQ ID NO: 1256 - DNA, 45 bp, Homo sapiens
acagaccaggagtgtacgggaatgtgatggtattcacggactgga

SEQ ID NO: 1257 - DNA, 45 bp, Homo sapiens
tcattactcgatgctgttgataacagcaagatggctttgaactca

SEQ ID NO: 1258 - DNA, 45 bp, Homo sapiens
tatcattactcgatgctgttgataacagcaagatggctttgaact

SEQ ID NO: 1259 - DNA, 45 bp, Homo sapiens
gatacaagctggggttctggctgtgccaaagcttacagaccagga

SEQ ID NO: 1260 - DNA, 45 bp, Mus sp.
cagtggagggccgctggttactttgaagaatgggatctggtggct

SEQ ID NO: 1261 - DNA, 45 bp, Mus sp.
atcgagccctccaaatgtaatagtaaatacatatacaacaaccta

SEQ ID NO: 1262 - DNA, 45 bp, Mus sp.
ccttgatcgagccctccaaatgtaatagtaaatacatatacaaca

SEQ ID NO: 1263 - DNA, 45 bp, Mus sp.
acccttgatcgagccctccaaatgtaatagtaaatacatatacaa

SEQ ID NO: 1264 - DNA, 45 bp, Mus sp.
catggtacccttgatcgagccctccaaatgtaatagtaaatacat

SEQ ID NO: 1265 - DNA, 45 bp, Mus sp.
tgccatggtacccttgatcgagccctccaaatgtaatagtaaata

SEQ ID NO: 1266 - DNA, 45 bp, Homo sapiens
gatgcaacagcagatatgtctatgacaacctgatcacaccagcca

SEQ ID NO: 1267 - DNA, 45 bp, Mus sp.
gagaaagggaagacctcggacgtgttgaatgctgccatggtaccc

SEQ ID NO: 1268 - DNA, 45 bp, Homo sapiens
gagacacagagatgcaacagcagatatgtctatgacaacctgatc

SEQ ID NO: 1269 - DNA, 45 bp, Mus sp.
tgagaaagggaagacctcggacgtgttgaatgctgccatggtacc

SEQ ID NO: 1270 - DNA, 45 bp, Homo sapiens
ctcattgagacacagagatgcaacagcagatatgtctatgacaac

SEQ ID NO: 1271 - DNA, 45 bp, Mus sp.
gtggggggccacctatgagaaagggaagacctcggacgtgttgaa

SEQ ID NO: 1272 - DNA, 45 bp, Homo sapiens
tattgaacattccagatacctatcattactcgatgctgttgataa

SEQ ID NO: 1273 - DNA, 45 bp, Homo sapiens
gagaaagggaagacctcagaagtgctgaacgctgccaaggtgctt

SEQ ID NO: 1274 - DNA, 45 bp, Homo sapiens
ggagaaagggaagacctcagaagtgctgaacgctgccaaggtgct

SEQ ID NO: 1275 - DNA, 45 bp, Homo sapiens
gtcatattgaacattccagatacctatcattactcgatgctgttg

SEQ ID NO: 1276 - DNA, 45 bp, Homo sapiens
ggtcatattgaacattccagatacctatcattactcgatgctgtt

SEQ ID NO: 1277 - DNA, 45 bp, Mus sp.
aagctgcagacacctttggcttttaatgatctagtgaagccagtg

SEQ ID NO: 1278 - DNA, 45 bp, Mus sp.
acgacattgctctcatgaagctgcagacacctttggcttttaatg

SEQ ID NO: 1279 - DNA, 45 bp, Mus sp.
tctaagaccaagaataacgacattgctctcatgaagctgcagaca

SEQ ID NO: 1280 - DNA, 45 bp, Homo sapiens
tgcgctgatgaagctgcagaagcctctgactttcaacgacctagt

SEQ ID NO: 1281 - DNA, 45 bp, Mus sp.
ggtagaaaaagtaatttcccatccaaattacgactctaagaccaa

SEQ ID NO: 1282 - DNA, 45 bp, Mus sp.
tctctcatgttctatggaagtagacaccaggtagaaaaagtaatt

SEQ ID NO: 1283 - DNA, 45 bp, Mus sp.
gtctctcatgttctatggaagtagacaccaggtagaaaaagtaat

SEQ ID NO: 1284 - DNA, 45 bp, Mus sp.
tgagacagtctctcatgttctatggaagtagacaccaggtagaaa

SEQ ID NO: 1285 - DNA, 45 bp, Homo sapiens
atttctcatccaaattatgactccaagaccaagaacaatgacatt

SEQ ID NO: 1286 - DNA, 45 bp, Homo sapiens
agtagaaaaagtgatttctcatccaaattatgactccaagaccaa

SEQ ID NO: 1287 - DNA, 45 bp, Mus sp.
catttgcgggaattctgagacagtctctcatgttctatggaagta

SEQ ID NO: 1288 - DNA, 45 bp, Mus sp.
gcatttgcgggaattctgagacagtctctcatgttctatggaagt

SEQ ID NO: 1289 - DNA, 45 bp, Mus sp.
gtactggacggcatttgcgggaattctgagacagtctctcatgtt

SEQ ID NO: 1290 - DNA, 45 bp, Homo sapiens
ccgcctggagcgcggcaggtcatattgaacattccagatacctat

SEQ ID NO: 1291 - DNA, 45 bp, Homo sapiens
atttgcggggattttgagacaatctttcatgttctatggagccgg

SEQ ID NO: 1292 - DNA, 45 bp, Homo sapiens
gagcgccgcctggagcgcggcaggtcatattgaacattccagata

SEQ ID NO: 1293 - DNA, 45 bp, Homo sapiens
acctcttaacaatccatggcattggacggcatttgcggggatttt

SEQ ID NO: 1294 - DNA, 45 bp, Homo sapiens
aacctcttaacaatccatggcattggacggcatttgcggggattt

SEQ ID NO: 1295 - RNA, 20 nt, Homo sapiens
uuguauuuauauaauguaua

SEQ ID NO: 1296 - RNA, 20 nt, Homo sapiens
auuguauuuauauaauguau

SEQ ID NO: 1297 - RNA, 20 nt, Homo sapiens
uauauuguauuuauauaaug

SEQ ID NO: 1298 - RNA, 20 nt, Homo sapiens
uuauauuguauuuauauaau

SEQ ID NO: 1299 - RNA, 20 nt, Homo sapiens
aauauuuauauuguauuuau

SEQ ID NO: 1300 - RNA, 20 nt, Homo sapiens
aaagaaauauuuauauugua

SEQ ID NO: 1301 - RNA, 20 nt, Homo sapiens
uuaaagaaauauuuauauug

SEQ ID NO: 1302 - RNA, 20 nt, Homo sapiens
uuuuaaagaaauauuuauau

SEQ ID NO: 1303 - RNA, 20 nt, Homo sapiens
ggcuaacuuauacauauuuu

SEQ ID NO: 1304 - RNA, 20 nt, Homo sapiens
uggcuaacuuauacauauuu

SEQ ID NO: 1305 - RNA, 20 nt, Homo sapiens
aaauaaauggcuaacuuaua

SEQ ID NO: 1306 - RNA, 20 nt, Homo sapiens
ccucaaauaaauggcuaacu

SEQ ID NO: 1307 - RNA, 20 nt, Homo sapiens
accucaaauaaauggcuaac

SEQ ID NO: 1308 - RNA, 20 nt, Homo sapiens
uaccucaaauaaauggcuaa

SEQ ID NO: 1309 - RNA, 20 nt, Homo sapiens
uuaccucaaauaaauggcua

SEQ ID NO: 1310 - RNA, 20 nt, Homo sapiens
cuuaccucaaauaaauggcu

SEQ ID NO: 1311 - RNA, 20 nt, Homo sapiens
uaggcuuaccucaaauaaau

SEQ ID NO: 1312 - RNA, 20 nt, Homo sapiens
uggaaaguguaggcuuaccu

SEQ ID NO: 1313 - RNA, 20 nt, Homo sapiens
cuuggaaaguguaggcuuac

SEQ ID NO: 1314 - RNA, 20 nt, Homo sapiens
agagccagaucauuucuugg

SEQ ID NO: 1315 - RNA, 20 nt, Homo sapiens
guuucagagccagaucauuu

SEQ ID NO: 1316 - RNA, 20 nt, Homo sapiens
gcaguuugaauauccuuugu

SEQ ID NO: 1317 - RNA, 20 nt, Homo sapiens
aauggaaaguggcuaugcag

SEQ ID NO: 1318 - RNA, 20 nt, Homo sapiens
gaaauaauaauggaaagugg

SEQ ID NO: 1319 - RNA, 20 nt, Homo sapiens
uuugaaauaauaauggaaag

SEQ ID NO: 1320 - RNA, 20 nt, Homo sapiens
uguauuaguuuugaaauaau

SEQ ID NO: 1321 - RNA, 20 nt, Homo sapiens
uauguauuaguuuugaaaua

SEQ ID NO: 1322 - RNA, 20 nt, Homo sapiens
cauuuuauguauuaguuuug

SEQ ID NO: 1323 - RNA, 20 nt, Homo sapiens
acuugaaacauuuuauguau

SEQ ID NO: 1324 - RNA, 20 nt, Homo sapiens
accacuugaaacauuuuaug

SEQ ID NO: 1325 - RNA, 20 nt, Homo sapiens
uaccacuugaaacauuuuau

SEQ ID NO: 1326 - RNA, 20 nt, Homo sapiens
guaccacuugaaacauuuua

SEQ ID NO: 1327 - RNA, 20 nt, Homo sapiens
uuaagaaguaccacuugaaa

SEQ ID NO: 1328 - RNA, 20 nt, Homo sapiens
uuuaagaaguaccacuugaa

SEQ ID NO: 1329 - RNA, 20 nt, Homo sapiens
uuuuaagaaguaccacuuga

SEQ ID NO: 1330 - RNA, 20 nt, Homo sapiens
uauguaagucauauuuauau

SEQ ID NO: 1331 - RNA, 20 nt, Homo sapiens
uuauguaagucauauuuaua

SEQ ID NO: 1332 - RNA, 20 nt, Homo sapiens
aauuuauguaagucauauuu

SEQ ID NO: 1333 - RNA, 20 nt, Homo sapiens
uaauuuauguaagucauauu

SEQ ID NO: 1334 - RNA, 20 nt, Homo sapiens
uuaauuuauguaagucauau

SEQ ID NO: 1335 - RNA, 20 nt, Homo sapiens
aguuaauuuauguaagucau

SEQ ID NO: 1336 - RNA, 20 nt, Homo sapiens
gaguuaauuuauguaaguca

SEQ ID NO: 1337 - RNA, 20 nt, Homo sapiens
ugaguuaauuuauguaaguc

SEQ ID NO: 1338 - RNA, 20 nt, Homo sapiens
cugaguuaauuuauguaagu

SEQ ID NO: 1339 - RNA, 20 nt, Homo sapiens
gaagcugaguuaauuuaugu

SEQ ID NO: 1340 - RNA, 20 nt, Homo sapiens
ugaagcugaguuaauuuaug

SEQ ID NO: 1341 - RNA, 20 nt, Homo sapiens
gugaagcugaguuaauuuau

SEQ ID NO: 1342 - RNA, 20 nt, Homo sapiens
augugaagcugaguuaauuu

SEQ ID NO: 1343 - RNA, 20 nt, Homo sapiens
auaugugaagcugaguuaau

SEQ ID NO: 1344 - RNA, 20 nt, Homo sapiens
uuaaauaugugaagcugagu

SEQ ID NO: 1345 - RNA, 20 nt, Homo sapiens
uuuaaauaugugaagcugag

SEQ ID NO: 1346 - RNA, 20 nt, Homo sapiens
auuuaaauaugugaagcuga

SEQ ID NO: 1347 - RNA, 20 nt, Homo sapiens
uaauauuuaaauaugugaag

SEQ ID NO: 1348 - RNA, 20 nt, Homo sapiens
auuaauauuuaaauauguga

SEQ ID NO: 1349 - RNA, 20 nt, Homo sapiens
uuauuaauauuuaaauaugu

SEQ ID NO: 1350 - RNA, 20 nt, Homo sapiens
uaauuuauuaauauuuaaau

SEQ ID NO: 1351 - RNA, 20 nt, Homo sapiens
uuuaauuuauuaauauuuaa

SEQ ID NO: 1352 - RNA, 20 nt, Homo sapiens
uaggacacuauuuuaauuau

SEQ ID NO: 1353 - RNA, 20 nt, Homo sapiens
uuaggacacuauuuuaauua

SEQ ID NO: 1354 - RNA, 20 nt, Homo sapiens
guuaggacacuauuuuaauu

SEQ ID NO: 1355 - RNA, 20 nt, Homo sapiens
gcguuaggacacuauuuuaa

SEQ ID NO: 1356 - RNA, 20 nt, Homo sapiens
agcguuaggacacuauuuua

SEQ ID NO: 1357 - RNA, 20 nt, Homo sapiens
gagcguuaggacacuauuuu

SEQ ID NO: 1358 - RNA, 20 nt, Homo sapiens
ugagcguuaggacacuauuu

SEQ ID NO: 1359 - RNA, 20 nt, Homo sapiens
augagcguuaggacacuauu

SEQ ID NO: 1360 - RNA, 20 nt, Homo sapiens
cuaaaaguaugagcguuagg

SEQ ID NO: 1361 - RNA, 20 nt, Homo sapiens
auggagaacuaaaaguauga

SEQ ID NO: 1362 - RNA, 20 nt, Homo sapiens
uucucuauggagaacuaaaa

SEQ ID NO: 1363 - RNA, 20 nt, Homo sapiens
ugggcacagaacuuauguug

SEQ ID NO: 1364 - RNA, 20 nt, Homo sapiens
guccacugggcacagaacuu

SEQ ID NO: 1365 - RNA, 20 nt, Homo sapiens
guuguuaaugggcauuccuu

SEQ ID NO: 1366 - RNA, 20 nt, Homo sapiens
uguagcaugggcaccucaga

SEQ ID NO: 1367 - RNA, 20 nt, Homo sapiens
cgcagcuuuaaggaguuccu

SEQ ID NO: 1368 - RNA, 20 nt, Homo sapiens
ccagcuaugaacuccuucuc

SEQ ID NO: 1369 - RNA, 20 nt, Homo sapiens
gacaacucaucucauucugc

SEQ ID NO: 1370 - RNA, 20 nt, Homo sapiens
gagcccagcuaugaacuccu

SEQ ID NO: 1371 - RNA, 20 nt, Homo sapiens
augaguacaaaaguccugau

SEQ ID NO: 1372 - RNA, 20 nt, Homo sapiens
gcagaugaguacaaaagucc

SEQ ID NO: 1373 - RNA, 20 nt, Homo sapiens
aggaacaagccagagcugug

SEQ ID NO: 1374 - RNA, 20 nt, Homo sapiens
cagaacagauuugagaguag

SEQ ID NO: 1375 - RNA, 20 nt, Homo sapiens
ccagaacagauuugagagua

SEQ ID NO: 1376 - RNA, 20 nt, Homo sapiens
uuggaguuugagguauaccu

SEQ ID NO: 1377 - RNA, 20 nt, Homo sapiens
acuggucuuuuggaguuuga

SEQ ID NO: 1378 - RNA, 20 nt, Homo sapiens
caucacuggucuuuuggagu

SEQ ID NO: 1379 - RNA, 20 nt, Homo sapiens
gugaaaaucaucacuggucu

SEQ ID NO: 1380 - RNA, 20 nt, Homo sapiens
ugccuggugaaaaucaucac

SEQ ID NO: 1381 - RNA, 20 nt, Homo sapiens
uugccuggugaaaaucauca

SEQ ID NO: 1382 - RNA, 20 nt, Homo sapiens
ucaaugaggagacuugccug

SEQ ID NO: 1383 - RNA, 20 nt, Homo sapiens
auucaaugaggagacuugcc

SEQ ID NO: 1384 - RNA, 20 nt, Homo sapiens
gcuuccaaucuggauucaau

SEQ ID NO: 1385 - RNA, 20 nt, Homo sapiens
uggcagaaaacaaccugaac

SEQ ID NO: 1386 - RNA, 20 nt, Homo sapiens
aguaacaugugugaaagcag

SEQ ID NO: 1387 - RNA, 20 nt, Homo sapiens
uaacaagaguaacaugugug

SEQ ID NO: 1388 - RNA, 20 nt, Homo sapiens
guaacaagaguaacaugugu

SEQ ID NO: 1389 - RNA, 20 nt, Homo sapiens
agacauguaacaagaguaac

SEQ ID NO: 1390 - RNA, 20 nt, Homo sapiens
ggagacauguaacaagagua

SEQ ID NO: 1391 - RNA, 20 nt, Homo sapiens
uauaauguauaaaugguuuu

SEQ ID NO: 1392 - RNA, 20 nt, Homo sapiens
auauaauguauaaaugguuu

SEQ ID NO: 1393 - RNA, 20 nt, Homo sapiens
uauauaauguauaaaugguu

SEQ ID NO: 1394 - RNA, 20 nt, Homo sapiens
uguauuuauauaauguauaa

SEQ ID NO: 1395 - RNA, 20 nt, Mus sp.
uguuauauguuauaguuuug

SEQ ID NO: 1396 - RNA, 20 nt, Mus sp.
uugccuauugaaaauuuccu

SEQ ID NO: 1397 - RNA, 20 nt, Mus sp.
uugcuaauuuaaauauguuu

SEQ ID NO: 1398 - RNA, 20 nt, Mus sp.
uaauuuaugauugauauuua

SEQ ID NO: 1399 - RNA, 20 nt, Mus sp.
uaauuuauugauaauuuaaa

SEQ ID NO: 1400 - RNA, 20 nt, Mus sp.
ucaaugaauugcuaauuuaa

SEQ ID NO: 1401 - RNA, 20 nt, Mus sp.
uaaguuaauuuaugauugau

SEQ ID NO: 1402 - RNA, 20 nt, Mus sp.
uuuaaguuaauuuaugauug

SEQ ID NO: 1403 - RNA, 20 nt, Mus sp.
aauguugggacacuauuuua

SEQ ID NO: 1404 - RNA, 20 nt, Mus sp.
guuuaccucaaugaauugcu

SEQ ID NO: 1405 - RNA, 20 nt, Mus sp.
uuggaauguauaaguuuacc

SEQ ID NO: 1406 - RNA, 20 nt, Mus sp.
ugucagguaucugacuuaug

SEQ ID NO: 1407 - RNA, 20 nt, Mus sp.
aaagaaaucuuugugaugua

SEQ ID NO: 1408 - RNA, 20 nt, Mus sp.
uuaauuuauugauaauuuaa

SEQ ID NO: 1409 - RNA, 20 nt, Mus sp.
guugggacacuauuuuaauu

SEQ ID NO: 1410 - RNA, 20 nt, Mus sp.
uuauaauguuuagacugucu

SEQ ID NO: 1411 - RNA, 20 nt, Mus sp.
uugaaauguuauauguuaua

SEQ ID NO: 1412 - RNA, 20 nt, Mus sp.
aaccaagagguaaaagauuu

SEQ ID NO: 1413 - RNA, 20 nt, Mus sp.
aaguuaauuuaugauugaua

SEQ ID NO: 1414 - RNA, 20 nt, Mus sp.
auugaaaauuuccucugguc

SEQ ID NO: 1415 - RNA, 20 nt, Mus sp.
ggcuuaauuacacauguucu

SEQ ID NO: 1416 - RNA, 20 nt, Mus sp.
cuaagcauaucaguuugugg

SEQ ID NO: 1417 - RNA, 20 nt, Mus sp.
uuugccuauugaaaauuucc

SEQ ID NO: 1418 - RNA, 20 nt, Mus sp.
aucuauuugauauaaauauu

SEQ ID NO: 1419 - RNA, 20 nt, Mus sp.
gucacuugaaauguuauaug

SEQ ID NO: 1420 - RNA, 20 nt, Mus sp.
uugauaauuuaaauaaguaa

SEQ ID NO: 1421 - RNA, 20 nt, Mus sp.
auuuaaauaaguaaacuuua

SEQ ID NO: 1422 - RNA, 20 nt, Mus sp.
uuuaaauaaguaaacuuuaa

SEQ ID NO: 1423 - RNA, 20 nt, Mus sp.
uuaaguuaauuuaugauuga

SEQ ID NO: 1424 - RNA, 20 nt, Mus sp.
uaaauaaguaaacuuuaagu

SEQ ID NO: 1425 - RNA, 20 nt, Mus sp.
uucaucuugaaaucacuuga

SEQ ID NO: 1426 - RNA, 20 nt, Mus sp.
cugacaauaugaauguuggg

SEQ ID NO: 1427 - RNA, 20 nt, Mus sp.
uucucuacgaagaacugaca

SEQ ID NO: 1428 - RNA, 20 nt, Mus sp.
ucagaaaauauauccuguug

SEQ ID NO: 1429 - RNA, 20 nt, Mus sp.
gaugguuucuuggaauguau

SEQ ID NO: 1430 - RNA, 20 nt, Mus sp.
agugucacuugaaauguuau

SEQ ID NO: 1431 - RNA, 20 nt, Mus sp.
uuugauauaaauauucuguu

SEQ ID NO: 1432 - RNA, 20 nt, Mus sp.
uuuaaagaaaucuuugugau

SEQ ID NO: 1433 - RNA, 20 nt, Mus sp.
uuugaaaugauaaccuaaaa

SEQ ID NO: 1434 - RNA, 20 nt, Mus sp.
auaaucaggaaauuugccua

SEQ ID NO: 1435 - RNA, 20 nt, Mus sp.
caagagguaaaagauuuaca

SEQ ID NO: 1436 - RNA, 20 nt, Mus sp.
gaaaugagaaaagaguugug

SEQ ID NO: 1437 - RNA, 20 nt, Mus sp.
aaacuuuaaguuaauuuaug

SEQ ID NO: 1438 - RNA, 20 nt, Mus sp.
auugauaauuuaaauaagua

SEQ ID NO: 1439 - RNA, 20 nt, Mus sp.
uaaguaaacuuuaaguuaau

SEQ ID NO: 1440 - RNA, 20 nt, Mus sp.
ugggaaaucguggaaaugag

SEQ ID NO: 1441 - RNA, 20 nt, Mus sp.
agagauacaaagaaaugaug

SEQ ID NO: 1442 - RNA, 20 nt, Mus sp.
augaauguugggacacuauu

SEQ ID NO: 1443 - RNA, 20 nt, Mus sp.
aaaacaaucugaaacuucca

SEQ ID NO: 1444 - RNA, 20 nt, Mus sp.
ugccuauugaaaauuuccuc

SEQ ID NO: 1445 - RNA, 20 nt, Mus sp.
cagaaaauauauccuguugu

SEQ ID NO: 1446 - RNA, 20 nt, Mus sp.
uaaacuuuaaguuaauuuau

SEQ ID NO: 1447 - RNA, 20 nt, Mus sp.
uauaguuuugaaaugauaac

SEQ ID NO: 1448 - RNA, 20 nt, Mus sp.
caauucaucuugaaaucacu

SEQ ID NO: 1449 - RNA, 20 nt, Mus sp.
augauugauauuuauuauuu

SEQ ID NO: 1450 - RNA, 20 nt, Mus sp.
auugcuaauuuaaauauguu

SEQ ID NO: 1451 - RNA, 20 nt, Mus sp.
uaccccaauuuccaaugcuc

SEQ ID NO: 1452 - RNA, 20 nt, Mus sp.
cucugcaagagacuuccauc

SEQ ID NO: 1453 - RNA, 20 nt, Mus sp.
ccaaacuggauauaaucagg

SEQ ID NO: 1454 - RNA, 20 nt, Mus sp.
uuuaauuuauugauaauuua

SEQ ID NO: 1455 - RNA, 20 nt, Mus sp.
gauggaugcuaccaaacugg

SEQ ID NO: 1456 - RNA, 20 nt, Mus sp.
ucuguuaccuagccagaugg

SEQ ID NO: 1457 - RNA, 20 nt, Mus sp.
uuauauguuauaguuuugaa

SEQ ID NO: 1458 - RNA, 20 nt, Mus sp.
caaugaauugcuaauuuaaa

SEQ ID NO: 1459 - RNA, 20 nt, Mus sp.
aaaucacuugaagaauuucu

SEQ ID NO: 1460 - RNA, 20 nt, Mus sp.
aauugcuaauuuaaauaugu

SEQ ID NO: 1461 - RNA, 20 nt, Mus sp.
guuaccuagccagaugguuu

SEQ ID NO: 1462 - RNA, 20 nt, Mus sp.
uggaauguauaaguuuaccu

SEQ ID NO: 1463 - RNA, 20 nt, Mus sp.
acuugaaauguuauauguua

SEQ ID NO: 1464 - RNA, 20 nt, Mus sp.
guaaacuuuaaguuaauuua

SEQ ID NO: 1465 - RNA, 20 nt, Mus sp.
guuauaguuuugaaaugaua

SEQ ID NO: 1466 - RNA, 20 nt, Mus sp.
gugcaauggcaauucugauu

SEQ ID NO: 1467 - RNA, 20 nt, Mus sp.
aaucacuugaagaauuucua

SEQ ID NO: 1468 - RNA, 20 nt, Mus sp.
uuuuaauuuauugauaauuu

SEQ ID NO: 1469 - RNA, 20 nt, Mus sp.
uccagagauacaaagaaaug

SEQ ID NO: 1470 - RNA, 20 nt, Mus sp.
cuuuaaguuaauuuaugauu

SEQ ID NO: 1471 - RNA, 20 nt, Mus sp.
accucaaugaauugcuaauu

SEQ ID NO: 1472 - RNA, 20 nt, Mus sp.
uggucagaaaauauauccug

SEQ ID NO: 1473 - RNA, 20 nt, Mus sp.
uauaauguuuagacugucuu

SEQ ID NO: 1474 - RNA, 20 nt, Mus sp.
uugauauaaauauucuguua

SEQ ID NO: 1475 - RNA, 20 nt, Mus sp.
uuuaugaagugucacuugaa

SEQ ID NO: 1476 - RNA, 20 nt, Mus sp.
gcagaaaacaaucugaaacu

SEQ ID NO: 1477 - RNA, 20 nt, Mus sp.
uugggacacuauuuuaauua

SEQ ID NO: 1478 - RNA, 20 nt, Mus sp.
ggauauaaucaggaaauuug

SEQ ID NO: 1479 - RNA, 20 nt, Mus sp.
uuuuauaauguuuagacugu

SEQ ID NO: 1480 - RNA, 20 nt, Mus sp.
uguucucugggaaaucgugg

SEQ ID NO: 1481 - RNA, 20 nt, Mus sp.
gaagaauuucuaaaagucac

SEQ ID NO: 1482 - RNA, 20 nt, Mus sp.
ucaucuugaaaucacuugaa

SEQ ID NO: 1483 - RNA, 20 nt, Mus sp.
uugugcaauggcaauucuga

SEQ ID NO: 1484 - RNA, 20 nt, Mus sp.
aucuucaaccaagagguaaa

SEQ ID NO: 1485 - RNA, 20 nt, Mus sp.
uuaccuagccagaugguuuc

SEQ ID NO: 1486 - RNA, 20 nt, Mus sp.
uaccucaaugaauugcuaau

SEQ ID NO: 1487 - RNA, 20 nt, Mus sp.
cuugaaaucacuugaagaau

SEQ ID NO: 1488 - RNA, 20 nt, Mus sp.
uuaugauugauauuuauuau

SEQ ID NO: 1489 - RNA, 20 nt, Mus sp.
auuugccuauugaaaauuuc

SEQ ID NO: 1490 - RNA, 20 nt, Mus sp.
ucuuggaauguauaaguuua

SEQ ID NO: 1491 - RNA, 20 nt, Mus sp.
uaauuuaaauaaguaaacuu

SEQ ID NO: 1492 - RNA, 20 nt, Mus sp.
ucugaaacuuccagagauac

SEQ ID NO: 1493 - RNA, 20 nt, Mus sp.
gaggcuuaauuacacauguu

SEQ ID NO: 1494 - RNA, 20 nt, Mus sp.
aguaaacuuuaaguuaauuu

SEQ ID NO: 1495 - DNA, 45 bp, Homo sapiens
aaagaaatatttatattgtatttatataatgtataaatggttttt

SEQ ID NO: 1496 - DNA, 45 bp, Homo sapiens
taaagaaatatttatattgtatttatataatgtataaatggtttt

SEQ ID NO: 1497 - DNA, 45 bp, Homo sapiens
ttttaaagaaatatttatattgtatttatataatgtataaatggt

SEQ ID NO: 1498 - DNA, 45 bp, Homo sapiens
tttttaaagaaatatttatattgtatttatataatgtataaatgg

SEQ ID NO: 1499 - DNA, 45 bp, Homo sapiens
acatatttttaaagaaatatttatattgtatttatataatgtata

SEQ ID NO: 1500 - DNA, 45 bp, Homo sapiens
cttatacatatttttaaagaaatatttatattgtatttatataat

SEQ ID NO: 1501 - DNA, 45 bp, Homo sapiens
aacttatacatatttttaaagaaatatttatattgtatttatata

SEQ ID NO: 1502 - DNA, 45 bp, Homo sapiens
ctaacttatacatatttttaaagaaatatttatattgtatttata

SEQ ID NO: 1503 - DNA, 45 bp, Homo sapiens
ttacctcaaataaatggctaacttatacatatttttaaagaaata

SEQ ID NO: 1504 - DNA, 45 bp, Homo sapiens
cttacctcaaataaatggctaacttatacatatttttaaagaaat

SEQ ID NO: 1505 - DNA, 45 bp, Homo sapiens
gtgtaggcttacctcaaataaatggctaacttatacatattttta

SEQ ID NO: 1506 - DNA, 45 bp, Homo sapiens
gaaagtgtaggcttacctcaaataaatggctaacttatacatatt

SEQ ID NO: 1507 - DNA, 45 bp, Homo sapiens
ggaaagtgtaggcttacctcaaataaatggctaacttatacatat

SEQ ID NO: 1508 - DNA, 45 bp, Homo sapiens
tggaaagtgtaggcttacctcaaataaatggctaacttatacata

SEQ ID NO: 1509 - DNA, 45 bp, Homo sapiens
ttggaaagtgtaggcttacctcaaataaatggctaacttatacat

SEQ ID NO: 1510 - DNA, 45 bp, Homo sapiens
cttggaaagtgtaggcttacctcaaataaatggctaacttataca

SEQ ID NO: 1511 - DNA, 45 bp, Homo sapiens
atttcttggaaagtgtaggcttacctcaaataaatggctaactta

SEQ ID NO: 1512 - DNA, 45 bp, Homo sapiens
agccagatcatttcttggaaagtgtaggcttacctcaaataaatg

SEQ ID NO: 1513 - DNA, 45 bp, Homo sapiens
agagccagatcatttcttggaaagtgtaggcttacctcaaataaa

SEQ ID NO: 1514 - DNA, 45 bp, Homo sapiens
aatatcctttgtttcagagccagatcatttcttggaaagtgtagg

SEQ ID NO: 1515 - DNA, 45 bp, Homo sapiens
gtttgaatatcctttgtttcagagccagatcatttcttggaaagt

SEQ ID NO: 1516 - DNA, 45 bp, Homo sapiens
atggaaagtggctatgcagtttgaatatcctttgtttcagagcca

SEQ ID NO: 1517 - DNA, 45 bp, Homo sapiens
tagttttgaaataataatggaaagtggctatgcagtttgaatatc

SEQ ID NO: 1518 - DNA, 45 bp, Homo sapiens
ttatgtattagttttgaaataataatggaaagtggctatgcagtt

SEQ ID NO: 1519 - DNA, 45 bp, Homo sapiens
attttatgtattagttttgaaataataatggaaagtggctatgca

SEQ ID NO: 1520 - DNA, 45 bp, Homo sapiens
acttgaaacattttatgtattagttttgaaataataatggaaagt

SEQ ID NO: 1521 - DNA, 45 bp, Homo sapiens
ccacttgaaacattttatgtattagttttgaaataataatggaaa

SEQ ID NO: 1522 - DNA, 45 bp, Homo sapiens
aagtaccacttgaaacattttatgtattagttttgaaataataat

SEQ ID NO: 1523 - DNA, 45 bp, Homo sapiens
tttttaagaagtaccacttgaaacattttatgtattagttttgaa

SEQ ID NO: 1524 - DNA, 45 bp, Homo sapiens
atatttttaagaagtaccacttgaaacattttatgtattagtttt

SEQ ID NO: 1525 - DNA, 45 bp, Homo sapiens
tatatttttaagaagtaccacttgaaacattttatgtattagttt

SEQ ID NO: 1526 - DNA, 45 bp, Homo sapiens
ttatatttttaagaagtaccacttgaaacattttatgtattagtt

SEQ ID NO: 1527 - DNA, 45 bp, Homo sapiens
gtcatatttatatttttaagaagtaccacttgaaacattttatgt

SEQ ID NO: 1528 - DNA, 45 bp, Homo sapiens
agtcatatttatatttttaagaagtaccacttgaaacattttatg

SEQ ID NO: 1529 - DNA, 45 bp, Homo sapiens
aagtcatatttatatttttaagaagtaccacttgaaacattttat

SEQ ID NO: 1530 - DNA, 45 bp, Homo sapiens
gaagctgagttaatttatgtaagtcatatttatatttttaagaag

SEQ ID NO: 1531 - DNA, 45 bp, Homo sapiens
tgaagctgagttaatttatgtaagtcatatttatatttttaagaa

SEQ ID NO: 1532 - DNA, 45 bp, Homo sapiens
atgtgaagctgagttaatttatgtaagtcatatttatatttttaa

SEQ ID NO: 1533 - DNA, 45 bp, Homo sapiens
tatgtgaagctgagttaatttatgtaagtcatatttatattttta

SEQ ID NO: 1534 - DNA, 45 bp, Homo sapiens
atatgtgaagctgagttaatttatgtaagtcatatttatattttt

SEQ ID NO: 1535 - DNA, 45 bp, Homo sapiens
aaatatgtgaagctgagttaatttatgtaagtcatatttatattt

SEQ ID NO: 1536 - DNA, 45 bp, Homo sapiens
taaatatgtgaagctgagttaatttatgtaagtcatatttatatt

SEQ ID NO: 1537 - DNA, 45 bp, Homo sapiens
ttaaatatgtgaagctgagttaatttatgtaagtcatatttatat

SEQ ID NO: 1538 - DNA, 45 bp, Homo sapiens
tttaaatatgtgaagctgagttaatttatgtaagtcatatttata

SEQ ID NO: 1539 - DNA, 45 bp, Homo sapiens
aatatttaaatatgtgaagctgagttaatttatgtaagtcatatt

SEQ ID NO: 1540 - DNA, 45 bp, Homo sapiens
taatatttaaatatgtgaagctgagttaatttatgtaagtcatat

SEQ ID NO: 1541 - DNA, 45 bp, Homo sapiens
ttaatatttaaatatgtgaagctgagttaatttatgtaagtcata

SEQ ID NO: 1542 - DNA, 45 bp, Homo sapiens
tattaatatttaaatatgtgaagctgagttaatttatgtaagtca

SEQ ID NO: 1543 - DNA, 45 bp, Homo sapiens
tttattaatatttaaatatgtgaagctgagttaatttatgtaagt

SEQ ID NO: 1544 - DNA, 45 bp, Homo sapiens
ttaatttattaatatttaaatatgtgaagctgagttaatttatgt

SEQ ID NO: 1545 - DNA, 45 bp, Homo sapiens
tttaatttattaatatttaaatatgtgaagctgagttaatttatg

SEQ ID NO: 1546 - DNA, 45 bp, Homo sapiens
ttttaatttattaatatttaaatatgtgaagctgagttaatttat

SEQ ID NO: 1547 - DNA, 45 bp, Homo sapiens
ttatttttaatttattaatatttaaatatgtgaagctgagttaat

SEQ ID NO: 1548 - DNA, 45 bp, Homo sapiens
aattatttttaatttattaatatttaaatatgtgaagctgagtta

SEQ ID NO: 1549 - DNA, 45 bp, Homo sapiens
ttaattatttttaatttattaatatttaaatatgtgaagctgagt

SEQ ID NO: 1550 - DNA, 45 bp, Homo sapiens
tattttaattatttttaatttattaatatttaaatatgtgaagct

SEQ ID NO: 1551 - DNA, 45 bp, Homo sapiens
actattttaattatttttaatttattaatatttaaatatgtgaag

SEQ ID NO: 1552 - DNA, 45 bp, Homo sapiens
taaaagtatgagcgttaggacactattttaattatttttaattta

SEQ ID NO: 1553 - DNA, 45 bp, Homo sapiens
ctaaaagtatgagcgttaggacactattttaattatttttaattt

SEQ ID NO: 1554 - DNA, 45 bp, Homo sapiens
actaaaagtatgagcgttaggacactattttaattatttttaatt

SEQ ID NO: 1555 - DNA, 45 bp, Homo sapiens
gaactaaaagtatgagcgttaggacactattttaattatttttaa

SEQ ID NO: 1556 - DNA, 45 bp, Homo sapiens
agaactaaaagtatgagcgttaggacactattttaattattttta

SEQ ID NO: 1557 - DNA, 45 bp, Homo sapiens
gagaactaaaagtatgagcgttaggacactattttaattattttt

SEQ ID NO: 1558 - DNA, 45 bp, Homo sapiens
ggagaactaaaagtatgagcgttaggacactattttaattatttt

SEQ ID NO: 1559 - DNA, 45 bp, Homo sapiens
tggagaactaaaagtatgagcgttaggacactattttaattattt

SEQ ID NO: 1560 - DNA, 45 bp, Homo sapiens
gttctctatggagaactaaaagtatgagcgttaggacactatttt

SEQ ID NO: 1561 - DNA, 45 bp, Homo sapiens
cttatgttgttctctatggagaactaaaagtatgagcgttaggac

SEQ ID NO: 1562 - DNA, 45 bp, Homo sapiens
acagaacttatgttgttctctatggagaactaaaagtatgagcgt

SEQ ID NO: 1563 - DNA, 45 bp, Homo sapiens
cagaaacctgtccactgggcacagaacttatgttgttctctatgg

SEQ ID NO: 1564 - DNA, 45 bp, Homo sapiens
tctggtcagaaacctgtccactgggcacagaacttatgttgttct

SEQ ID NO: 1565 - DNA, 45 bp, Homo sapiens
gcacctcagattgttgttgttaatgggcattccttcttctggtca

SEQ ID NO: 1566 - DNA, 45 bp, Homo sapiens
gggctcttcggcaaatgtagcatgggcacctcagattgttgttgt

SEQ ID NO: 1567 - DNA, 45 bp, Homo sapiens
actcatctcattctgcgcagctttaaggagttcctgcagtccagc

SEQ ID NO: 1568 - DNA, 45 bp, Homo sapiens
ctcccctccaggagcccagctatgaactccttctccacaataccc

SEQ ID NO: 1569 - DNA, 45 bp, Homo sapiens
gtggctgcaggacatgacaactcatctcattctgcgcagctttaa

SEQ ID NO: 1570 - DNA, 45 bp, Homo sapiens
ctatctcccctccaggagcccagctatgaactccttctccacaat

SEQ ID NO: 1571 - DNA, 45 bp, Homo sapiens
gccagagctgtgcagatgagtacaaaagtcctgatccagttcctg

SEQ ID NO: 1572 - DNA, 45 bp, Homo sapiens
acaagccagagctgtgcagatgagtacaaaagtcctgatccagtt

SEQ ID NO: 1573 - DNA, 45 bp, Homo sapiens
gatttgagagtagtgaggaacaagccagagctgtgcagatgagta

SEQ ID NO: 1574 - DNA, 45 bp, Homo sapiens
tacctagagtacctccagaacagatttgagagtagtgaggaacaa

SEQ ID NO: 1575 - DNA, 45 bp, Homo sapiens
atacctagagtacctccagaacagatttgagagtagtgaggaaca

SEQ ID NO: 1576 - DNA, 45 bp, Homo sapiens
atcatcactggtcttttggagtttgaggtatacctagagtacctc

SEQ ID NO: 1577 - DNA, 45 bp, Homo sapiens
ctggtgaaaatcatcactggtcttttggagtttgaggtataccta

SEQ ID NO: 1578 - DNA, 45 bp, Homo sapiens
ttgcctggtgaaaatcatcactggtcttttggagtttgaggtata

SEQ ID NO: 1579 - DNA, 45 bp, Homo sapiens
gaggagacttgcctggtgaaaatcatcactggtcttttggagttt

SEQ ID NO: 1580 - DNA, 45 bp, Homo sapiens
ttcaatgaggagacttgcctggtgaaaatcatcactggtcttttg

SEQ ID NO: 1581 - DNA, 45 bp, Homo sapiens
attcaatgaggagacttgcctggtgaaaatcatcactggtctttt

SEQ ID NO: 1582 - DNA, 45 bp, Homo sapiens
gcttccaatctggattcaatgaggagacttgcctggtgaaaatca

SEQ ID NO: 1583 - DNA, 45 bp, Homo sapiens
atgcttccaatctggattcaatgaggagacttgcctggtgaaaat

SEQ ID NO: 1584 - DNA, 45 bp, Homo sapiens
ctgaaaaagatggatgcttccaatctggattcaatgaggagactt

SEQ ID NO: 1585 - DNA, 45 bp, Homo sapiens
gcagcaaagaggcactggcagaaaacaacctgaaccttccaaaga

SEQ ID NO: 1586 - DNA, 45 bp, Homo sapiens
gagacatgtaacaagagtaacatgtgtgaaagcagcaaagaggca

SEQ ID NO: 1587 - DNA, 45 bp, Homo sapiens
gagaaaggagacatgtaacaagagtaacatgtgtgaaagcagcaa

SEQ ID NO: 1588 - DNA, 45 bp, Homo sapiens
tgagaaaggagacatgtaacaagagtaacatgtgtgaaagcagca

SEQ ID NO: 1589 - DNA, 45 bp, Homo sapiens
cagccctgagaaaggagacatgtaacaagagtaacatgtgtgaaa

SEQ ID NO: 1590 - DNA, 45 bp, Homo sapiens
ctcagccctgagaaaggagacatgtaacaagagtaacatgtgtga

SEQ ID NO: 1591 - DNA, 45 bp, Homo sapiens
tttatattgtatttatataatgtataaatggtttttataccaata

SEQ ID NO: 1592 - DNA, 45 bp, Homo sapiens
atttatattgtatttatataatgtataaatggtttttataccaat

SEQ ID NO: 1593 - DNA, 45 bp, Homo sapiens
tatttatattgtatttatataatgtataaatggtttttataccaa

SEQ ID NO: 1594 - DNA, 45 bp, Homo sapiens
aagaaatatttatattgtatttatataatgtataaatggttttta

SEQ ID NO: 1595 - DNA, 45 bp, Mus sp.
aagtgtcacttgaaatgttatatgttatagttttgaaatgataac

SEQ ID NO: 1596 - DNA, 45 bp, Mus sp.
atataatcaggaaatttgcctattgaaaatttcctctggtcttct

SEQ ID NO: 1597 - DNA, 45 bp, Mus sp.
gtttacctcaatgaattgctaatttaaatatgtttttaaagaaat

SEQ ID NO: 1598 - DNA, 45 bp, Mus sp.
aagtaaactttaagttaatttatgattgatatttattatttttat

SEQ ID NO: 1599 - DNA, 45 bp, Mus sp.
tattttaattatttttaatttattgataatttaaataagtaaact

SEQ ID NO: 1600 - DNA, 45 bp, Mus sp.
atgtataagtttacctcaatgaattgctaatttaaatatgttttt

SEQ ID NO: 1601 - DNA, 45 bp, Mus sp.
taaataagtaaactttaagttaatttatgattgatatttattatt

SEQ ID NO: 1602 - DNA, 45 bp, Mus sp.
tttaaataagtaaactttaagttaatttatgattgatatttatta

SEQ ID NO: 1603 - DNA, 45 bp, Mus sp.
agaactgacaatatgaatgttgggacactattttaattattttta

SEQ ID NO: 1604 - DNA, 45 bp, Mus sp.
tcttggaatgtataagtttacctcaatgaattgctaatttaaata

SEQ ID NO: 1605 - DNA, 45 bp, Mus sp.
tagccagatggtttcttggaatgtataagtttacctcaatgaatt

SEQ ID NO: 1606 - DNA, 45 bp, Mus sp.
gaaaatatatcctgttgtcaggtatctgacttatgttgttctcta

SEQ ID NO: 1607 - DNA, 45 bp, Mus sp.
tttaaatatgtttttaaagaaatctttgtgatgtatttttataat

SEQ ID NO: 1608 - DNA, 45 bp, Mus sp.
ctattttaattatttttaatttattgataatttaaataagtaaac

SEQ ID NO: 1609 - DNA, 45 bp, Mus sp.
actgacaatatgaatgttgggacactattttaattatttttaatt

SEQ ID NO: 1610 - DNA, 45 bp, Mus sp.
ctttgtgatgtatttttataatgtttagactgtcttcaaacaaat

SEQ ID NO: 1611 - DNA, 45 bp, Mus sp.
tttatgaagtgtcacttgaaatgttatatgttatagttttgaaat

SEQ ID NO: 1612 - DNA, 45 bp, Mus sp.
ctaattcatatcttcaaccaagaggtaaaagatttacataaaata

SEQ ID NO: 1613 - DNA, 45 bp, Mus sp.
aaataagtaaactttaagttaatttatgattgatatttattattt

SEQ ID NO: 1614 - DNA, 45 bp, Mus sp.
tcaggaaatttgcctattgaaaatttcctctggtcttctggagta

SEQ ID NO: 1615 - DNA, 45 bp, Mus sp.
acttcacaagtcggaggcttaattacacatgttctctgggaaatc

SEQ ID NO: 1616 - DNA, 45 bp, Mus sp.
cctagtgcgttatgcctaagcatatcagtttgtggacattcctca

SEQ ID NO: 1617 - DNA, 45 bp, Mus sp.
gatataatcaggaaatttgcctattgaaaatttcctctggtcttc

SEQ ID NO: 1618 - DNA, 45 bp, Mus sp.
aatgataacctaaaaatctatttgatataaatattctgttaccta

SEQ ID NO: 1619 - DNA, 45 bp, Mus sp.
ttatttttatgaagtgtcacttgaaatgttatatgttatagtttt

SEQ ID NO: 1620 - DNA, 45 bp, Mus sp.
attatttttaatttattgataatttaaataagtaaactttaagtt

SEQ ID NO: 1621 - DNA, 45 bp, Mus sp.
tttaatttattgataatttaaataagtaaactttaagttaattta

SEQ ID NO: 1622 - DNA, 45 bp, Mus sp.
ttaatttattgataatttaaataagtaaactttaagttaatttat

SEQ ID NO: 1623 - DNA, 45 bp, Mus sp.
ttaaataagtaaactttaagttaatttatgattgatatttattat

SEQ ID NO: 1624 - DNA, 45 bp, Mus sp.
aatttattgataatttaaataagtaaactttaagttaatttatga

SEQ ID NO: 1625 - DNA, 45 bp, Mus sp.
accaagaccatccaattcatcttgaaatcacttgaagaatttcta

SEQ ID NO: 1626 - DNA, 45 bp, Mus sp.
gttctctacgaagaactgacaatatgaatgttgggacactatttt

SEQ ID NO: 1627 - DNA, 45 bp, Mus sp.
atctgacttatgttgttctctacgaagaactgacaatatgaatgt

SEQ ID NO: 1628 - DNA, 45 bp, Mus sp.
cattcctcactgtggtcagaaaatatatcctgttgtcaggtatct

SEQ ID NO: 1629 - DNA, 45 bp, Mus sp.
tctgttacctagccagatggtttcttggaatgtataagtttacct

SEQ ID NO: 1630 - DNA, 45 bp, Mus sp.
ttattatttttatgaagtgtcacttgaaatgttatatgttatagt

SEQ ID NO: 1631 - DNA, 45 bp, Mus sp.
taacctaaaaatctatttgatataaatattctgttacctagccag

SEQ ID NO: 1632 - DNA, 45 bp, Mus sp.
taatttaaatatgtttttaaagaaatctttgtgatgtatttttat

SEQ ID NO: 1633 - DNA, 45 bp, Mus sp.
gttatatgttatagttttgaaatgataacctaaaaatctatttga

SEQ ID NO: 1634 - DNA, 45 bp, Mus sp.
gctaccaaactggatataatcaggaaatttgcctattgaaaattt

SEQ ID NO: 1635 - DNA, 45 bp, Mus sp.
attcatatcttcaaccaagaggtaaaagatttacataaaatagtc

SEQ ID NO: 1636 - DNA, 45 bp, Mus sp.
ctctgggaaatcgtggaaatgagaaaagagttgtgcaatggcaat

SEQ ID NO: 1637 - DNA, 45 bp, Mus sp.
ataatttaaataagtaaactttaagttaatttatgattgatattt

SEQ ID NO: 1638 - DNA, 45 bp, Mus sp.
aattatttttaatttattgataatttaaataagtaaactttaagt

SEQ ID NO: 1639 - DNA, 45 bp, Mus sp.
tattgataatttaaataagtaaactttaagttaatttatgattga

SEQ ID NO: 1640 - DNA, 45 bp, Mus sp.
attacacatgttctctgggaaatcgtggaaatgagaaaagagttg

SEQ ID NO: 1641 - DNA, 45 bp, Mus sp.
caatctgaaacttccagagatacaaagaaatgatggatgctacca

SEQ ID NO: 1642 - DNA, 45 bp, Mus sp.
cgaagaactgacaatatgaatgttgggacactattttaattattt

SEQ ID NO: 1643 - DNA, 45 bp, Mus sp.
atgatgcacttgcagaaaacaatctgaaacttccagagatacaaa

SEQ ID NO: 1644 - DNA, 45 bp, Mus sp.
tataatcaggaaatttgcctattgaaaatttcctctggtcttctg

SEQ ID NO: 1645 - DNA, 45 bp, Mus sp.
attcctcactgtggtcagaaaatatatcctgttgtcaggtatctg

SEQ ID NO: 1646 - DNA, 45 bp, Mus sp.
gataatttaaataagtaaactttaagttaatttatgattgatatt

SEQ ID NO: 1647 - DNA, 45 bp, Mus sp.
tgaaatgttatatgttatagttttgaaatgataacctaaaaatct

SEQ ID NO: 1648 - DNA, 45 bp, Mus sp.
aggaccaagaccatccaattcatcttgaaatcacttgaagaattt

SEQ ID NO: 1649 - DNA, 45 bp, Mus sp.
actttaagttaatttatgattgatatttattatttttatgaagtg

SEQ ID NO: 1650 - DNA, 45 bp, Mus sp.
agtttacctcaatgaattgctaatttaaatatgtttttaaagaaa

SEQ ID NO: 1651 - DNA, 45 bp, Mus sp.
taaaatagtccttcctaccccaatttccaatgctctcctaacaga

SEQ ID NO: 1652 - DNA, 45 bp, Mus sp.
cgctatgaagttcctctctgcaagagacttccatccagttgcctt

SEQ ID NO: 1653 - DNA, 45 bp, Mus sp.
aaatgatggatgctaccaaactggatataatcaggaaatttgcct

SEQ ID NO: 1654 - DNA, 45 bp, Mus sp.
actattttaattatttttaatttattgataatttaaataagtaaa

SEQ ID NO: 1655 - DNA, 45 bp, Mus sp.
gagatacaaagaaatgatggatgctaccaaactggatataatcag

SEQ ID NO: 1656 - DNA, 45 bp, Mus sp.
atttgatataaatattctgttacctagccagatggtttcttggaa

SEQ ID NO: 1657 - DNA, 45 bp, Mus sp.
gtgtcacttgaaatgttatatgttatagttttgaaatgataacct

SEQ ID NO: 1658 - DNA, 45 bp, Mus sp.
tgtataagtttacctcaatgaattgctaatttaaatatgttttta

SEQ ID NO: 1659 - DNA, 45 bp, Mus sp.
atccaattcatcttgaaatcacttgaagaatttctaaaagtcact

SEQ ID NO: 1660 - DNA, 45 bp, Mus sp.
aagtttacctcaatgaattgctaatttaaatatgtttttaaagaa

SEQ ID NO: 1661 - DNA, 45 bp, Mus sp.
tgatataaatattctgttacctagccagatggtttcttggaatgt

SEQ ID NO: 1662 - DNA, 45 bp, Mus sp.
agccagatggtttcttggaatgtataagtttacctcaatgaattg

SEQ ID NO: 1663 - DNA, 45 bp, Mus sp.
tttttatgaagtgtcacttgaaatgttatatgttatagttttgaa

SEQ ID NO: 1664 - DNA, 45 bp, Mus sp.
tgataatttaaataagtaaactttaagttaatttatgattgatat

SEQ ID NO: 1665 - DNA, 45 bp, Mus sp.
cttgaaatgttatatgttatagttttgaaatgataacctaaaaat

SEQ ID NO: 1666 - DNA, 45 bp, Mus sp.
aatgagaaaagagttgtgcaatggcaattctgattgtatgaacaa

SEQ ID NO: 1667 - DNA, 45 bp, Mus sp.
tccaattcatcttgaaatcacttgaagaatttctaaaagtcactt

SEQ ID NO: 1668 - DNA, 45 bp, Mus sp.
cactattttaattatttttaatttattgataatttaaataagtaa

SEQ ID NO: 1669 - DNA, 45 bp, Mus sp.
aaacaatctgaaacttccagagatacaaagaaatgatggatgcta

SEQ ID NO: 1670 - DNA, 45 bp, Mus sp.
atttaaataagtaaactttaagttaatttatgattgatatttatt

SEQ ID NO: 1671 - DNA, 45 bp, Mus sp.
ggaatgtataagtttacctcaatgaattgctaatttaaatatgtt

SEQ ID NO: 1672 - DNA, 45 bp, Mus sp.
ggacattcctcactgtggtcagaaaatatatcctgttgtcaggta

SEQ ID NO: 1673 - DNA, 45 bp, Mus sp.
tttgtgatgtatttttataatgtttagactgtcttcaaacaaata

SEQ ID NO: 1674 - DNA, 45 bp, Mus sp.
aacctaaaaatctatttgatataaatattctgttacctagccaga

SEQ ID NO: 1675 - DNA, 45 bp, Mus sp.
ttgatatttattatttttatgaagtgtcacttgaaatgttatatg

SEQ ID NO: 1676 - DNA, 45 bp, Mus sp.
aacgatgatgcacttgcagaaaacaatctgaaacttccagagata

SEQ ID NO: 1677 - DNA, 45 bp, Mus sp.
ctgacaatatgaatgttgggacactattttaattatttttaattt

SEQ ID NO: 1678 - DNA, 45 bp, Mus sp.
ggatgctaccaaactggatataatcaggaaatttgcctattgaaa

SEQ ID NO: 1679 - DNA, 45 bp, Mus sp.
atctttgtgatgtatttttataatgtttagactgtcttcaaacaa

SEQ ID NO: 1680 - DNA, 45 bp, Mus sp.
aggcttaattacacatgttctctgggaaatcgtggaaatgagaaa

SEQ ID NO: 1681 - DNA, 45 bp, Mus sp.
atcttgaaatcacttgaagaatttctaaaagtcactttgagatct

SEQ ID NO: 1682 - DNA, 45 bp, Mus sp.
ccaagaccatccaattcatcttgaaatcacttgaagaatttctaa

SEQ ID NO: 1683 - DNA, 45 bp, Mus sp.
gaaatgagaaaagagttgtgcaatggcaattctgattgtatgaac

SEQ ID NO: 1684 - DNA, 45 bp, Mus sp.
gaaactctaattcatatcttcaaccaagaggtaaaagatttacat

SEQ ID NO: 1685 - DNA, 45 bp, Mus sp.
gatataaatattctgttacctagccagatggtttcttggaatgta

SEQ ID NO: 1686 - DNA, 45 bp, Mus sp.
tggaatgtataagtttacctcaatgaattgctaatttaaatatgt

SEQ ID NO: 1687 - DNA, 45 bp, Mus sp.
gaccatccaattcatcttgaaatcacttgaagaatttctaaaagt

SEQ ID NO: 1688 - DNA, 45 bp, Mus sp.
aaactttaagttaatttatgattgatatttattatttttatgaag

SEQ ID NO: 1689 - DNA, 45 bp, Mus sp.
ggatataatcaggaaatttgcctattgaaaatttcctctggtctt

SEQ ID NO: 1690 - DNA, 45 bp, Mus sp.
cctagccagatggtttcttggaatgtataagtttacctcaatgaa

SEQ ID NO: 1691 - DNA, 45 bp, Mus sp.
tttttaatttattgataatttaaataagtaaactttaagttaatt

SEQ ID NO: 1692 - DNA, 45 bp, Mus sp.
acttgcagaaaacaatctgaaacttccagagatacaaagaaatga

SEQ ID NO: 1693 - DNA, 45 bp, Mus sp.
ccacttcacaagtcggaggcttaattacacatgttctctgggaaa

SEQ ID NO: 1694 - DNA, 45 bp, Mus sp.
ttgataatttaaataagtaaactttaagttaatttatgattgata

SEQ ID NO: 1695 - RNA, 20 nt, Homo sapiens
auggacaugagauaauguua

SEQ ID NO: 1696 - RNA, 20 nt, Homo sapiens
uuuagaugcugaugauuugu

SEQ ID NO: 1697 - RNA, 20 nt, Homo sapiens
uuucacuuuagaugcugaug

SEQ ID NO: 1698 - RNA, 20 nt, Homo sapiens
uagaugcugaugauuuguuu

SEQ ID NO: 1699 - RNA, 20 nt, Homo sapiens
gaggauauauuuucacuuug

SEQ ID NO: 1700 - RNA, 20 nt, Homo sapiens
ccagcauugcugguucuauu

SEQ ID NO: 1701 - RNA, 20 nt, Homo sapiens
auuuucacuuugugauuauu

SEQ ID NO: 1702 - RNA, 20 nt, Homo sapiens
gccuucaugacaacucauuc

SEQ ID NO: 1703 - RNA, 20 nt, Homo sapiens
uuugugauuauuucacuuua

SEQ ID NO: 1704 - RNA, 20 nt, Homo sapiens
guuugaggauauauuuucac

SEQ ID NO: 1705 - RNA, 20 nt, Homo sapiens
uggacaugagauaauguuag

SEQ ID NO: 1706 - RNA, 20 nt, Homo sapiens
ucugggaguccccuuuucuu

SEQ ID NO: 1707 - RNA, 20 nt, Homo sapiens
uaaacaggcccagcauugcu

SEQ ID NO: 1708 - RNA, 20 nt, Homo sapiens
caugacaacucauuccuggg

SEQ ID NO: 1709 - RNA, 20 nt, Homo sapiens
agauaauguuagagguuuua

SEQ ID NO: 1710 - RNA, 20 nt, Homo sapiens
accaaguucacccucguacu

SEQ ID NO: 1711 - RNA, 20 nt, Homo sapiens
agcagcaacaggaaccuugg

SEQ ID NO: 1712 - RNA, 20 nt, Homo sapiens
uuuucacuuugugauuauuu

SEQ ID NO: 1713 - RNA, 20 nt, Homo sapiens
gauaauguuagagguuuuaa

SEQ ID NO: 1714 - RNA, 20 nt, Homo sapiens
uuugcaccccucccauuagg

SEQ ID NO: 1715 - RNA, 20 nt, Homo sapiens
uagagauugaaaacaccagc

SEQ ID NO: 1716 - RNA, 20 nt, Homo sapiens
aaaggagugaaaccuuuagg

SEQ ID NO: 1717 - RNA, 20 nt, Homo sapiens
cuggguuggugcacagugau

SEQ ID NO: 1718 - RNA, 20 nt, Homo sapiens
uauauuuucacuuugugauu

SEQ ID NO: 1719 - RNA, 20 nt, Homo sapiens
uuuaaacaggcccagcauug

SEQ ID NO: 1720 - RNA, 20 nt, Homo sapiens
cccucaaaccuccucuucug

SEQ ID NO: 1721 - RNA, 20 nt, Homo sapiens
cuuuagaugcugaugauuug

SEQ ID NO: 1722 - RNA, 20 nt, Homo sapiens
gcugguuuuguaagaugcug

SEQ ID NO: 1723 - RNA, 20 nt, Homo sapiens
cacggcauuguggucuccau

SEQ ID NO: 1724 - RNA, 20 nt, Homo sapiens
ucacuuugugauuauuucac

SEQ ID NO: 1725 - RNA, 20 nt, Homo sapiens
gcugguucuauuuaauggac

SEQ ID NO: 1726 - RNA, 20 nt, Homo sapiens
agcaguggcaaccagaauga

SEQ ID NO: 1727 - RNA, 20 nt, Homo sapiens
cuuggcaggcaauuaugauc

SEQ ID NO: 1728 - RNA, 20 nt, Homo sapiens
agcgaagccaacaacuaugg

SEQ ID NO: 1729 - RNA, 20 nt, Homo sapiens
gaagccaacaacuaugggac

SEQ ID NO: 1730 - RNA, 20 nt, Homo sapiens
ggagacugcuucccauccua

SEQ ID NO: 1731 - RNA, 20 nt, Homo sapiens
ucauaggucacuggcucucc

SEQ ID NO: 1732 - RNA, 20 nt, Homo sapiens
ugugauuauuucacuuuaga

SEQ ID NO: 1733 - RNA, 20 nt, Homo sapiens
acuuuagaugcugaugauuu

SEQ ID NO: 1734 - RNA, 20 nt, Homo sapiens
uauuuaauggacaugagaua

SEQ ID NO: 1735 - RNA, 20 nt, Homo sapiens
uauagcaccgagaaugacgu

SEQ ID NO: 1736 - RNA, 20 nt, Homo sapiens
cauugcugguucuauuuaau

SEQ ID NO: 1737 - RNA, 20 nt, Homo sapiens
gacaugagauaauguuagag

SEQ ID NO: 1738 - RNA, 20 nt, Homo sapiens
augauccuggggccaguuuu

SEQ ID NO: 1739 - RNA, 20 nt, Homo sapiens
gggccuucaugacaacucau

SEQ ID NO: 1740 - RNA, 20 nt, Homo sapiens
uuauuucacuuuagaugcug

SEQ ID NO: 1741 - RNA, 20 nt, Homo sapiens
uuaauggacaugagauaaug

SEQ ID NO: 1742 - RNA, 20 nt, Homo sapiens
gccaauaagaaccucacaug

SEQ ID NO: 1743 - RNA, 20 nt, Homo sapiens
aaagacaucgggaaacggcu

SEQ ID NO: 1744 - RNA, 20 nt, Homo sapiens
cccauuaggacaaucagucc

SEQ ID NO: 1745 - RNA, 20 nt, Homo sapiens
gauggguuuaaugacugggc

SEQ ID NO: 1746 - RNA, 20 nt, Homo sapiens
aucucaggggcuguuugagg

SEQ ID NO: 1747 - RNA, 20 nt, Homo sapiens
uguaagaugcuggguuggug

SEQ ID NO: 1748 - RNA, 20 nt, Homo sapiens
cugguucuauuuaauggaca

SEQ ID NO: 1749 - RNA, 20 nt, Homo sapiens
uucaccaacacgugggcugu

SEQ ID NO: 1750 - RNA, 20 nt, Homo sapiens
ugcgcucuggcuuuaguuuu

SEQ ID NO: 1751 - RNA, 20 nt, Homo sapiens
uuccauguggagaaaggagu

SEQ ID NO: 1752 - RNA, 20 nt, Homo sapiens
ucuauuuaauggacaugaga

SEQ ID NO: 1753 - RNA, 20 nt, Homo sapiens
uagagguuuuaaagugauua

SEQ ID NO: 1754 - RNA, 20 nt, Homo sapiens
agaagaaccacccggacuug

SEQ ID NO: 1755 - RNA, 20 nt, Homo sapiens
cuguuugaggauauauuuuc

SEQ ID NO: 1756 - RNA, 20 nt, Homo sapiens
auggguuuaaugacugggcc

SEQ ID NO: 1757 - RNA, 20 nt, Homo sapiens
gguuuaaugacugggccuuc

SEQ ID NO: 1758 - RNA, 20 nt, Homo sapiens
uuuaucaaagaccagagcgc

SEQ ID NO: 1759 - RNA, 20 nt, Homo sapiens
ucaggggcuguuugaggaua

SEQ ID NO: 1760 - RNA, 20 nt, Homo sapiens
auuucacuuuagaugcugau

SEQ ID NO: 1761 - RNA, 20 nt, Homo sapiens
aacaccagcgaagccaacaa

SEQ ID NO: 1762 - RNA, 20 nt, Homo sapiens
cuggucuucgucacugucuu

SEQ ID NO: 1763 - RNA, 20 nt, Homo sapiens
gcagcaacaggaaccuuggu

SEQ ID NO: 1764 - RNA, 20 nt, Homo sapiens
gaagguguacaccauggacc

SEQ ID NO: 1765 - RNA, 20 nt, Homo sapiens
gcaaccagaaugagaagcag

SEQ ID NO: 1766 - RNA, 20 nt, Homo sapiens
cacccuguccuauaaucgcc

SEQ ID NO: 1767 - RNA, 20 nt, Homo sapiens
auugcugguucuauuuaaug

SEQ ID NO: 1768 - RNA, 20 nt, Homo sapiens
guacacacagaugaaugaca

SEQ ID NO: 1769 - RNA, 20 nt, Homo sapiens
caggggcuguuugaggauau

SEQ ID NO: 1770 - RNA, 20 nt, Homo sapiens
gauuauuucacuuuagaugc

SEQ ID NO: 1771 - RNA, 20 nt, Homo sapiens
uccccuccuugggcacuuuu

SEQ ID NO: 1772 - RNA, 20 nt, Homo sapiens
uggcaaagcgacggacuaaa

SEQ ID NO: 1773 - RNA, 20 nt, Homo sapiens
uuuggcaacgugccguggua

SEQ ID NO: 1774 - RNA, 20 nt, Homo sapiens
ggaggccaauaagaaccuca

SEQ ID NO: 1775 - RNA, 20 nt, Homo sapiens
auccacaucuacagugccag

SEQ ID NO: 1776 - RNA, 20 nt, Homo sapiens
ggguuuaaugacugggccuu

SEQ ID NO: 1777 - RNA, 20 nt, Homo sapiens
cuagagauugaaaacaccag

SEQ ID NO: 1778 - RNA, 20 nt, Homo sapiens
ccugguugcuauggguggua

SEQ ID NO: 1779 - RNA, 20 nt, Homo sapiens
gccaguuuugaugucaauga

SEQ ID NO: 1780 - RNA, 20 nt, Homo sapiens
auggcgaggugacagaugca

SEQ ID NO: 1781 - RNA, 20 nt, Homo sapiens
uguccuauaaucgccguggc

SEQ ID NO: 1782 - RNA, 20 nt, Homo sapiens
cuccgcagauggguuuaaug

SEQ ID NO: 1783 - RNA, 20 nt, Homo sapiens
gucccucuaaagcaauaaug

SEQ ID NO: 1784 - RNA, 20 nt, Homo sapiens
ggaucucaggggcuguuuga

SEQ ID NO: 1785 - RNA, 20 nt, Homo sapiens
ccggacuuggcaggcaauua

SEQ ID NO: 1786 - RNA, 20 nt, Homo sapiens
caggcaauuaugauccuggg

SEQ ID NO: 1787 - RNA, 20 nt, Homo sapiens
agccucgguacacacagaug

SEQ ID NO: 1788 - RNA, 20 nt, Homo sapiens
gcuacaccaacaguaucuac

SEQ ID NO: 1789 - RNA, 20 nt, Homo sapiens
uggucuucgucacugucuuc

SEQ ID NO: 1790 - RNA, 20 nt, Homo sapiens
uuuguaagaugcuggguugg

SEQ ID NO: 1791 - RNA, 20 nt, Homo sapiens
guucuauuuaauggacauga

SEQ ID NO: 1792 - RNA, 20 nt, Homo sapiens
guuagagguuuuaaagugau

SEQ ID NO: 1793 - RNA, 20 nt, Homo sapiens
gcaauuaugauccuggggcc

SEQ ID NO: 1794 - RNA, 20 nt, Homo sapiens
uggggccaguuuugauguca

SEQ ID NO: 1795 - DNA, 45 bp, Homo sapiens
tgctggttctatttaatggacatgagataatgttagaggttttaa

SEQ ID NO: 1796 - DNA, 45 bp, Homo sapiens
ttgtgattatttcactttagatgctgatgatttgtttttgtattt

SEQ ID NO: 1797 - DNA, 45 bp, Homo sapiens
ttcactttgtgattatttcactttagatgctgatgatttgttttt

SEQ ID NO: 1798 - DNA, 45 bp, Homo sapiens
gtgattatttcactttagatgctgatgatttgtttttgtattttt

SEQ ID NO: 1799 - DNA, 45 bp, Homo sapiens
tctcaggggctgtttgaggatatattttcactttgtgattatttc

SEQ ID NO: 1800 - DNA, 45 bp, Homo sapiens
gtaatttaaacaggcccagcattgctggttctatttaatggacat

SEQ ID NO: 1801 - DNA, 45 bp, Homo sapiens
gctgtttgaggatatattttcactttgtgattatttcactttaga

SEQ ID NO: 1802 - DNA, 45 bp, Homo sapiens
gggtttaatgactgggccttcatgacaactcattcctgggatgag

SEQ ID NO: 1803 - DNA, 45 bp, Homo sapiens
aggatatattttcactttgtgattatttcactttagatgctgatg

SEQ ID NO: 1804 - DNA, 45 bp, Homo sapiens
gggatctcaggggctgtttgaggatatattttcactttgtgatta

SEQ ID NO: 1805 - DNA, 45 bp, Homo sapiens
gctggttctatttaatggacatgagataatgttagaggttttaaa

SEQ ID NO: 1806 - DNA, 45 bp, Homo sapiens
atcagtcccctcccatctgggagtccccttttcttttctacccta

SEQ ID NO: 1807 - DNA, 45 bp, Homo sapiens
ttttttcttgtaatttaaacaggcccagcattgctggttctattt

SEQ ID NO: 1808 - DNA, 45 bp, Homo sapiens
taatgactgggccttcatgacaactcattcctgggatgaggatcc

SEQ ID NO: 1809 - DNA, 45 bp, Homo sapiens
tatttaatggacatgagataatgttagaggttttaaagtgattaa

SEQ ID NO: 1810 - DNA, 45 bp, Homo sapiens
aactatgggacgctgaccaagttcaccctcgtactctatggcacc

SEQ ID NO: 1811 - DNA, 45 bp, Homo sapiens
gttgctatgggtggtagcagcaacaggaaccttggtcctgctagc

SEQ ID NO: 1812 - DNA, 45 bp, Homo sapiens
ctgtttgaggatatattttcactttgtgattatttcactttagat

SEQ ID NO: 1813 - DNA, 45 bp, Homo sapiens
atttaatggacatgagataatgttagaggttttaaagtgattaaa

SEQ ID NO: 1814 - DNA, 45 bp, Homo sapiens
tcttctgacgtgccttttgcacccctcccattaggacaatcagtc

SEQ ID NO: 1815 - DNA, 45 bp, Homo sapiens
ctggcgagtgggtcctagagattgaaaacaccagcgaagccaaca

SEQ ID NO: 1816 - DNA, 45 bp, Homo sapiens
cccttccatgtggagaaaggagtgaaacctttagggcagcttgcc

SEQ ID NO: 1817 - DNA, 45 bp, Homo sapiens
tggttttgtaagatgctgggttggtgcacagtgatttttttcttg

SEQ ID NO: 1818 - DNA, 45 bp, Homo sapiens
ggggctgtttgaggatatattttcactttgtgattatttcacttt

SEQ ID NO: 1819 - DNA, 45 bp, Homo sapiens
atttttttcttgtaatttaaacaggcccagcattgctggttctat

SEQ ID NO: 1820 - DNA, 45 bp, Homo sapiens
tgacctgtcatgcccccctcaaacctcctcttctgacgtgccttt

SEQ ID NO: 1821 - DNA, 45 bp, Homo sapiens
tttgtgattatttcactttagatgctgatgatttgtttttgtatt

SEQ ID NO: 1822 - DNA, 45 bp, Homo sapiens
ctcgtggccagcccggctggttttgtaagatgctgggttggtgca

SEQ ID NO: 1823 - DNA, 45 bp, Homo sapiens
cagggctacacagggcacggcattgtggtctccattctggacgat

SEQ ID NO: 1824 - DNA, 45 bp, Homo sapiens
tttgaggatatattttcactttgtgattatttcactttagatgct

SEQ ID NO: 1825 - DNA, 45 bp, Homo sapiens
aacaggcccagcattgctggttctatttaatggacatgagataat

SEQ ID NO: 1826 - DNA, 45 bp, Homo sapiens
ctggccacgacctacagcagtggcaaccagaatgagaagcagatc

SEQ ID NO: 1827 - DNA, 45 bp, Homo sapiens
gaagaaccacccggacttggcaggcaattatgatcctggggccag

SEQ ID NO: 1828 - DNA, 45 bp, Homo sapiens
gagattgaaaacaccagcgaagccaacaactatgggacgctgacc

SEQ ID NO: 1829 - DNA, 45 bp, Homo sapiens
attgaaaacaccagcgaagccaacaactatgggacgctgaccaag

SEQ ID NO: 1830 - DNA, 45 bp, Homo sapiens
ggaggcaagaggggtggagactgcttcccatcctaccctcgggcc

SEQ ID NO: 1831 - DNA, 45 bp, Homo sapiens
cgccatgccgggggttcataggtcactggctctccaagtgccaga

SEQ ID NO: 1832 - DNA, 45 bp, Homo sapiens
gatatattttcactttgtgattatttcactttagatgctgatgat

SEQ ID NO: 1833 - DNA, 45 bp, Homo sapiens
ctttgtgattatttcactttagatgctgatgatttgtttttgtat

SEQ ID NO: 1834 - DNA, 45 bp, Homo sapiens
cagcattgctggttctatttaatggacatgagataatgttagagg

SEQ ID NO: 1835 - DNA, 45 bp, Homo sapiens
gtcctcgatacgcactatagcaccgagaatgacgtggagaccatc

SEQ ID NO: 1836 - DNA, 45 bp, Homo sapiens
tttaaacaggcccagcattgctggttctatttaatggacatgaga

SEQ ID NO: 1837 - DNA, 45 bp, Homo sapiens
tggttctatttaatggacatgagataatgttagaggttttaaagt

SEQ ID NO: 1838 - DNA, 45 bp, Homo sapiens
acttggcaggcaattatgatcctggggccagttttgatgtcaatg

SEQ ID NO: 1839 - DNA, 45 bp, Homo sapiens
atgggtttaatgactgggccttcatgacaactcattcctgggatg

SEQ ID NO: 1840 - DNA, 45 bp, Homo sapiens
attttcactttgtgattatttcactttagatgctgatgatttgtt

SEQ ID NO: 1841 - DNA, 45 bp, Homo sapiens
cattgctggttctatttaatggacatgagataatgttagaggttt

SEQ ID NO: 1842 - DNA, 45 bp, Homo sapiens
gctctcaccctggaggccaataagaacctcacatggcgggacatg

SEQ ID NO: 1843 - DNA, 45 bp, Homo sapiens
atcctcaccgagcccaaagacatcgggaaacggctcgaggtgcgg

SEQ ID NO: 1844 - DNA, 45 bp, Homo sapiens
gccttttgcacccctcccattaggacaatcagtcccctcccatct

SEQ ID NO: 1845 - DNA, 45 bp, Homo sapiens
catgactactccgcagatgggtttaatgactgggccttcatgaca

SEQ ID NO: 1846 - DNA, 45 bp, Homo sapiens
ctttcccctgtggggatctcaggggctgtttgaggatatattttc

SEQ ID NO: 1847 - DNA, 45 bp, Homo sapiens
cagcccggctggttttgtaagatgctgggttggtgcacagtgatt

SEQ ID NO: 1848 - DNA, 45 bp, Homo sapiens
acaggcccagcattgctggttctatttaatggacatgagataatg

SEQ ID NO: 1849 - DNA, 45 bp, Homo sapiens
cagggccagaaggtcttcaccaacacgtgggctgtgcgcatccct

SEQ ID NO: 1850 - DNA, 45 bp, Homo sapiens
tcctggtcctgcagctgcgctctggctttagttttcggggggtga

SEQ ID NO: 1851 - DNA, 45 bp, Homo sapiens
caccctcagcaccccttccatgtggagaaaggagtgaaaccttta

SEQ ID NO: 1852 - DNA, 45 bp, Homo sapiens
cccagcattgctggttctatttaatggacatgagataatgttaga

SEQ ID NO: 1853 - DNA, 45 bp, Homo sapiens
gacatgagataatgttagaggttttaaagtgattaaacgtgcaga

SEQ ID NO: 1854 - DNA, 45 bp, Homo sapiens
tggacgatggcatcgagaagaaccacccggacttggcaggcaatt

SEQ ID NO: 1855 - DNA, 45 bp, Homo sapiens
tggggatctcaggggctgtttgaggatatattttcactttgtgat

SEQ ID NO: 1856 - DNA, 45 bp, Homo sapiens
atgactactccgcagatgggtttaatgactgggccttcatgacaa

SEQ ID NO: 1857 - DNA, 45 bp, Homo sapiens
actactccgcagatgggtttaatgactgggccttcatgacaactc

SEQ ID NO: 1858 - DNA, 45 bp, Homo sapiens
ggcgagaggaccgcctttatcaaagaccagagcgccctctgatga

SEQ ID NO: 1859 - DNA, 45 bp, Homo sapiens
tcccctgtggggatctcaggggctgtttgaggatatattttcact

SEQ ID NO: 1860 - DNA, 45 bp, Homo sapiens
tttcactttgtgattatttcactttagatgctgatgatttgtttt

SEQ ID NO: 1861 - DNA, 45 bp, Homo sapiens
gtcctagagattgaaaacaccagcgaagccaacaactatgggacg

SEQ ID NO: 1862 - DNA, 45 bp, Homo sapiens
tgcgccttcatcgtgctggtcttcgtcactgtcttcctggtcctg

SEQ ID NO: 1863 - DNA, 45 bp, Homo sapiens
ttgctatgggtggtagcagcaacaggaaccttggtcctgctagca

SEQ ID NO: 1864 - DNA, 45 bp, Homo sapiens
tagttttcggggggtgaaggtgtacaccatggaccgtggcctcat

SEQ ID NO: 1865 - DNA, 45 bp, Homo sapiens
cgacctacagcagtggcaaccagaatgagaagcagatcgtgacga

SEQ ID NO: 1866 - DNA, 45 bp, Homo sapiens
cgctcaggcgcggctcaccctgtcctataatcgccgtggcgacct

SEQ ID NO: 1867 - DNA, 45 bp, Homo sapiens
ttaaacaggcccagcattgctggttctatttaatggacatgagat

SEQ ID NO: 1868 - DNA, 45 bp, Homo sapiens
tgacccccagcctcggtacacacagatgaatgacaacaggcacgg

SEQ ID NO: 1869 - DNA, 45 bp, Homo sapiens
cccctgtggggatctcaggggctgtttgaggatatattttcactt

SEQ ID NO: 1870 - DNA, 45 bp, Homo sapiens
atattttcactttgtgattatttcactttagatgctgatgatttg

SEQ ID NO: 1871 - DNA, 45 bp, Homo sapiens
accccctcaagccaatcccctccttgggcactttttaattcacca

SEQ ID NO: 1872 - DNA, 45 bp, Homo sapiens
ggctggaacagcaggtggcaaagcgacggactaaacgggacgtgt

SEQ ID NO: 1873 - DNA, 45 bp, Homo sapiens
agcagcgccacgcagtttggcaacgtgccgtggtacagcgaggcc

SEQ ID NO: 1874 - DNA, 45 bp, Homo sapiens
cattgctctcaccctggaggccaataagaacctcacatggcggga

SEQ ID NO: 1875 - DNA, 45 bp, Homo sapiens
ctgaaccccaaccacatccacatctacagtgccagctggggcccc

SEQ ID NO: 1876 - DNA, 45 bp, Homo sapiens
gactactccgcagatgggtttaatgactgggccttcatgacaact

SEQ ID NO: 1877 - DNA, 45 bp, Homo sapiens
tctggcgagtgggtcctagagattgaaaacaccagcgaagccaac

SEQ ID NO: 1878 - DNA, 45 bp, Homo sapiens
ccatggagctgaggccctggttgctatgggtggtagcagcaacag

SEQ ID NO: 1879 - DNA, 45 bp, Homo sapiens
aattatgatcctggggccagttttgatgtcaatgaccaggaccct

SEQ ID NO: 1880 - DNA, 45 bp, Homo sapiens
gggtgcgcatgctggatggcgaggtgacagatgcagtggaggcac

SEQ ID NO: 1881 - DNA, 45 bp, Homo sapiens
aggcgcggctcaccctgtcctataatcgccgtggcgacctggcca

SEQ ID NO: 1882 - DNA, 45 bp, Homo sapiens
caggccacatgactactccgcagatgggtttaatgactgggcctt

SEQ ID NO: 1883 - DNA, 45 bp, Homo sapiens
ctcttgcccttccctgtccctctaaagcaataatggtcccatcca

SEQ ID NO: 1884 - DNA, 45 bp, Homo sapiens
tgctttcccctgtggggatctcaggggctgtttgaggatatattt

SEQ ID NO: 1885 - DNA, 45 bp, Homo sapiens
atcgagaagaaccacccggacttggcaggcaattatgatcctggg

SEQ ID NO: 1886 - DNA, 45 bp, Homo sapiens
accacccggacttggcaggcaattatgatcctggggccagttttg

SEQ ID NO: 1887 - DNA, 45 bp, Homo sapiens
aggaccctgacccccagcctcggtacacacagatgaatgacaaca

SEQ ID NO: 1888 - DNA, 45 bp, Homo sapiens
gctgcaactgcgacggctacaccaacagtatctacacgctgtcca

SEQ ID NO: 1889 - DNA, 45 bp, Homo sapiens
gcgccttcatcgtgctggtcttcgtcactgtcttcctggtcctgc

SEQ ID NO: 1890 - DNA, 45 bp, Homo sapiens
gccagcccggctggttttgtaagatgctgggttggtgcacagtga

SEQ ID NO: 1891 - DNA, 45 bp, Homo sapiens
ggcccagcattgctggttctatttaatggacatgagataatgtta

SEQ ID NO: 1892 - DNA, 45 bp, Homo sapiens
tggacatgagataatgttagaggttttaaagtgattaaacgtgca

SEQ ID NO: 1893 - DNA, 45 bp, Homo sapiens
acccggacttggcaggcaattatgatcctggggccagttttgatg

SEQ ID NO: 1894 - DNA, 45 bp, Homo sapiens
aggcaattatgatcctggggccagttttgatgtcaatgaccagga

SEQ ID NO: 1895 - RNA, 20 nt, Homo sapiens
uuggauuucauaccaugugg

SEQ ID NO: 1896 - RNA, 20 nt, Homo sapiens
ugucaaaacuaugacucugu

SEQ ID NO: 1897 - RNA, 20 nt, Homo sapiens
ccuagcauuggaaaauguug

SEQ ID NO: 1898 - RNA, 20 nt, Homo sapiens
auguaaauguuaauuucaug

SEQ ID NO: 1899 - RNA, 20 nt, Homo sapiens
ucuguuucuuaauaaggauu

SEQ ID NO: 1900 - RNA, 20 nt, Homo sapiens
caggaguugacauagauacu

SEQ ID NO: 1901 - RNA, 20 nt, Homo sapiens
aaugauuacucauucauucg

SEQ ID NO: 1902 - RNA, 20 nt, Homo sapiens
aucgauauuagcaaaggaga

SEQ ID NO: 1903 - RNA, 20 nt, Homo sapiens
caugguauagaaaauauaag

SEQ ID NO: 1904 - RNA, 20 nt, Homo sapiens
uuugaaaccaagaaucuccu

SEQ ID NO: 1905 - RNA, 20 nt, Homo sapiens
augggagugauagugguugg

SEQ ID NO: 1906 - RNA, 20 nt, Homo sapiens
uugaagagauuaaaccauua

SEQ ID NO: 1907 - RNA, 20 nt, Homo sapiens
uuuguuguauguaaauguua

SEQ ID NO: 1908 - RNA, 20 nt, Homo sapiens
uucaugguauagaaaauaua

SEQ ID NO: 1909 - RNA, 20 nt, Homo sapiens
cucuggauuugacuucuguu

SEQ ID NO: 1910 - RNA, 20 nt, Homo sapiens
uaaaccauuauaugaacauc

SEQ ID NO: 1911 - RNA, 20 nt, Homo sapiens
uuccucuugaggugauuuug

SEQ ID NO: 1912 - RNA, 20 nt, Homo sapiens
cauuaaaugucaaaacuaug

SEQ ID NO: 1913 - RNA, 20 nt, Homo sapiens
ggagaaaauaauccaggauu

SEQ ID NO: 1914 - RNA, 20 nt, Homo sapiens
uggccaaggagagagcaucu

SEQ ID NO: 1915 - RNA, 20 nt, Homo sapiens
ucagggauaaucuaaaugua

SEQ ID NO: 1916 - RNA, 20 nt, Homo sapiens
uucaagaagacaaugaaaca

SEQ ID NO: 1917 - RNA, 20 nt, Homo sapiens
aggacccuuuaccaauucca

SEQ ID NO: 1918 - RNA, 20 nt, Homo sapiens
uguaggagcaaagaacauga

SEQ ID NO: 1919 - RNA, 20 nt, Homo sapiens
aggagcaaagaacaugaaug

SEQ ID NO: 1920 - RNA, 20 nt, Homo sapiens
uggagaaaauccuuaugccu

SEQ ID NO: 1921 - RNA, 20 nt, Homo sapiens
ggugauuuuguuguauguaa

SEQ ID NO: 1922 - RNA, 20 nt, Homo sapiens
uucugcagccacaccuaagc

SEQ ID NO: 1923 - RNA, 20 nt, Homo sapiens
aaaacuaugacucuguucag

SEQ ID NO: 1924 - RNA, 20 nt, Homo sapiens
aucuaaauguaaaugucugu

SEQ ID NO: 1925 - RNA, 20 nt, Homo sapiens
uuagucuagggaaagucauu

SEQ ID NO: 1926 - RNA, 20 nt, Homo sapiens
ggagcaaguguuggaucuug

SEQ ID NO: 1927 - RNA, 20 nt, Homo sapiens
uuugacuucuguucuguuuc

SEQ ID NO: 1928 - RNA, 20 nt, Homo sapiens
uuuuguauuagaguauauua

SEQ ID NO: 1929 - RNA, 20 nt, Homo sapiens
gaggccauuauaugaagagu

SEQ ID NO: 1930 - RNA, 20 nt, Homo sapiens
ccaagaaucuccuuuaauuu

SEQ ID NO: 1931 - RNA, 20 nt, Homo sapiens
gaugauguucagaccuccuu

SEQ ID NO: 1932 - RNA, 20 nt, Homo sapiens
ucuggauuugacuucuguuc

SEQ ID NO: 1933 - RNA, 20 nt, Homo sapiens
uccaccauugaggaacaggc

SEQ ID NO: 1934 - RNA, 20 nt, Homo sapiens
uuauuacuugaaccagguuu

SEQ ID NO: 1935 - RNA, 20 nt, Homo sapiens
ugaaccagguuugaaugaaa

SEQ ID NO: 1936 - RNA, 20 nt, Homo sapiens
ugugggauggaguaccgacu

SEQ ID NO: 1937 - RNA, 20 nt, Homo sapiens
ugaggugauuuuguuguaug

SEQ ID NO: 1938 - RNA, 20 nt, Homo sapiens
uguauuugcucacaguguuu

SEQ ID NO: 1939 - RNA, 20 nt, Homo sapiens
auuacuugaaccagguuuga

SEQ ID NO: 1940 - RNA, 20 nt, Homo sapiens
auggcaagagcaaaucauua

SEQ ID NO: 1941 - RNA, 20 nt, Homo sapiens
uggacagaaaccaaacauag

SEQ ID NO: 1942 - RNA, 20 nt, Homo sapiens
uguauuagaguauauuaggg

SEQ ID NO: 1943 - RNA, 20 nt, Homo sapiens
auaucauuggagcaaguguu

SEQ ID NO: 1944 - RNA, 20 nt, Homo sapiens
guaaauguuaauuucauggu

SEQ ID NO: 1945 - RNA, 20 nt, Homo sapiens
cuuaauaaggauuuuguauu

SEQ ID NO: 1946 - RNA, 20 nt, Homo sapiens
cccaaguucaaaggcugaua

SEQ ID NO: 1947 - RNA, 20 nt, Homo sapiens
ucugccauuuacuuacaugu

SEQ ID NO: 1948 - RNA, 20 nt, Homo sapiens
aaggccacugcucaacuacu

SEQ ID NO: 1949 - RNA, 20 nt, Homo sapiens
gggacgaugucaagcucuuc

SEQ ID NO: 1950 - RNA, 20 nt, Homo sapiens
cacgaagccgaagaccuguu

SEQ ID NO: 1951 - RNA, 20 nt, Homo sapiens
acaagaaauucagaaucuca

SEQ ID NO: 1952 - RNA, 20 nt, Homo sapiens
ugugucugauaucauuccua

SEQ ID NO: 1953 - RNA, 20 nt, Homo sapiens
cagggauaaucuaaauguaa

SEQ ID NO: 1954 - RNA, 20 nt, Homo sapiens
cugauagaaacucauuucua

SEQ ID NO: 1955 - RNA, 20 nt, Homo sapiens
uaugauauggcauaugcugc

SEQ ID NO: 1956 - RNA, 20 nt, Homo sapiens
cacgauuguugggacucugc

SEQ ID NO: 1957 - RNA, 20 nt, Homo sapiens
gauguucagaccuccuuuua

SEQ ID NO: 1958 - RNA, 20 nt, Homo sapiens
auaagaugauaaagauauca

SEQ ID NO: 1959 - RNA, 20 nt, Homo sapiens
ugauaaagauaucauuaaau

SEQ ID NO: 1960 - RNA, 20 nt, Homo sapiens
guuucuuaauaaggauuuug

SEQ ID NO: 1961 - RNA, 20 nt, Homo sapiens
uuuguauuagaguauauuag

SEQ ID NO: 1962 - RNA, 20 nt, Homo sapiens
cuuggaauuauaacaccaau

SEQ ID NO: 1963 - RNA, 20 nt, Homo sapiens
agccguaucaaugaugcuuu

SEQ ID NO: 1964 - RNA, 20 nt, Homo sapiens
auuucugucucuggauuuga

SEQ ID NO: 1965 - RNA, 20 nt, Homo sapiens
gagcacaaagcagacacuca

SEQ ID NO: 1966 - RNA, 20 nt, Homo sapiens
aaagauaucauuaaauguca

SEQ ID NO: 1967 - RNA, 20 nt, Homo sapiens
gugaccuugacugaguuuug

SEQ ID NO: 1968 - RNA, 20 nt, Homo sapiens
uguggaacauaccuuugaag

SEQ ID NO: 1969 - RNA, 20 nt, Homo sapiens
uaugcuaugaggcaguacuu

SEQ ID NO: 1970 - RNA, 20 nt, Homo sapiens
uuccauauggcugauuguuu

SEQ ID NO: 1971 - RNA, 20 nt, Homo sapiens
acuacaaugagaggcucugg

SEQ ID NO: 1972 - RNA, 20 nt, Homo sapiens
auuugaaaccaagaaucucc

SEQ ID NO: 1973 - RNA, 20 nt, Homo sapiens
uguugaauuucugaaguuga

SEQ ID NO: 1974 - RNA, 20 nt, Homo sapiens
cccagucucuuaaaucuuuu

SEQ ID NO: 1975 - RNA, 20 nt, Homo sapiens
gaugggagugauagugguug

SEQ ID NO: 1976 - RNA, 20 nt, Homo sapiens
ugaugauguucagaccuccu

SEQ ID NO: 1977 - RNA, 20 nt, Homo sapiens
ugcuucuuggaauuauaaca

SEQ ID NO: 1978 - RNA, 20 nt, Homo sapiens
cuaaauguaaaugucuguug

SEQ ID NO: 1979 - RNA, 20 nt, Homo sapiens
aaugcuggggacaaaugguc

SEQ ID NO: 1980 - RNA, 20 nt, Homo sapiens
uuuucaagaagacaaugaaa

SEQ ID NO: 1981 - RNA, 20 nt, Homo sapiens
ucuuggagauaaagcauaug

SEQ ID NO: 1982 - RNA, 20 nt, Homo sapiens
aaugaaauguaccuguuccg

SEQ ID NO: 1983 - RNA, 20 nt, Homo sapiens
aauauaagaugauaaagaua

SEQ ID NO: 1984 - RNA, 20 nt, Homo sapiens
uguucuguuucuuaauaagg

SEQ ID NO: 1985 - RNA, 20 nt, Homo sapiens
uuugccuacagugauguuug

SEQ ID NO: 1986 - RNA, 20 nt, Homo sapiens
aaucucaugaggagguuuua

SEQ ID NO: 1987 - RNA, 20 nt, Homo sapiens
uaagaugauaaagauaucau

SEQ ID NO: 1988 - RNA, 20 nt, Homo sapiens
gauguuuggaaucgaucaug

SEQ ID NO: 1989 - RNA, 20 nt, Homo sapiens
ccacacuugcccaaauguau

SEQ ID NO: 1990 - RNA, 20 nt, Homo sapiens
gagacuaugaaguaaauggg

SEQ ID NO: 1991 - RNA, 20 nt, Homo sapiens
cuucauugacauugcuuuca

SEQ ID NO: 1992 - RNA, 20 nt, Homo sapiens
aaaugucuguugaauuucug

SEQ ID NO: 1993 - RNA, 20 nt, Homo sapiens
uguagcugcaaggauugaga

SEQ ID NO: 1994 - RNA, 20 nt, Homo sapiens
guugacauagauacucuuug

SEQ ID NO: 1995 - RNA, 20 nt, Homo sapiens
uguccaaaacaugaauaaug

SEQ ID NO: 1996 - RNA, 20 nt, Homo sapiens
gaugauaaagauaucauuaa

SEQ ID NO: 1997 - RNA, 20 nt, Homo sapiens
uuguauuagaguauauuagg

SEQ ID NO: 1998 - RNA, 20 nt, Homo sapiens
uucacaguaacucaguucaa

SEQ ID NO: 1999 - RNA, 20 nt, Homo sapiens
ucaggaguugacauagauac

SEQ ID NO: 2000 - RNA, 20 nt, Homo sapiens
uguacucuuugacaguuccc

SEQ ID NO: 2001 - RNA, 20 nt, Homo sapiens
ggagcuaaugaaggauucca

SEQ ID NO: 2002 - RNA, 20 nt, Homo sapiens
ugagcccuuauuuaccuggc

SEQ ID NO: 2003 - RNA, 20 nt, Homo sapiens
ugcuaugaggcaguacuuuu

SEQ ID NO: 2004 - RNA, 20 nt, Homo sapiens
guauguaaauguuaauuuca

SEQ ID NO: 2005 - RNA, 20 nt, Homo sapiens
ucuucauugacauugcuuuc

SEQ ID NO: 2006 - RNA, 20 nt, Homo sapiens
uuuggucucacaggcuguuc

SEQ ID NO: 2007 - RNA, 20 nt, Homo sapiens
uaagagagaaaaucucauga

SEQ ID NO: 2008 - RNA, 20 nt, Homo sapiens
caugagauggggcauaucca

SEQ ID NO: 2009 - RNA, 20 nt, Homo sapiens
uucuaaugauuacucauuca

SEQ ID NO: 2010 - RNA, 20 nt, Homo sapiens
guaucaaugaugcuuuccgu

SEQ ID NO: 2011 - RNA, 20 nt, Homo sapiens
guugaaaacaaggauauauc

SEQ ID NO: 2012 - RNA, 20 nt, Homo sapiens
gaagauguggaacauaccuu

SEQ ID NO: 2013 - RNA, 20 nt, Homo sapiens
uuugaagagauuaaaccauu

SEQ ID NO: 2014 - RNA, 20 nt, Homo sapiens
agaacaagaauucuuuugug

SEQ ID NO: 2015 - RNA, 20 nt, Homo sapiens
uagcaaaggagaaaauaauc

SEQ ID NO: 2016 - RNA, 20 nt, Homo sapiens
gaaaacaaggauauaucauu

SEQ ID NO: 2017 - RNA, 20 nt, Homo sapiens
caugcuuucuucaaggugac

SEQ ID NO: 2018 - RNA, 20 nt, Homo sapiens
aacccaaguucaaaggcuga

SEQ ID NO: 2019 - RNA, 20 nt, Homo sapiens
augaacaucuucaugccuau

SEQ ID NO: 2020 - RNA, 20 nt, Homo sapiens
acugggaucagagaucggaa

SEQ ID NO: 2021 - RNA, 20 nt, Homo sapiens
ucuucaaggugacaggucua

SEQ ID NO: 2022 - RNA, 20 nt, Homo sapiens
ucagcaaaaugggucuucag

SEQ ID NO: 2023 - RNA, 20 nt, Homo sapiens
gcaaacaguuuagacuacaa

SEQ ID NO: 2024 - RNA, 20 nt, Homo sapiens
aaaccauuauaugaacaucu

SEQ ID NO: 2025 - RNA, 20 nt, Homo sapiens
ucuguacucuuugacaguuc

SEQ ID NO: 2026 - RNA, 20 nt, Homo sapiens
uuugacaguucccuuuggac

SEQ ID NO: 2027 - RNA, 20 nt, Homo sapiens
gaaacagaaauaaacuuccu

SEQ ID NO: 2028 - RNA, 20 nt, Homo sapiens
caguauuuauuucugucucu

SEQ ID NO: 2029 - RNA, 20 nt, Homo sapiens
caguucaaguacuaugguga

SEQ ID NO: 2030 - RNA, 20 nt, Homo sapiens
guccaaaacaugaauaaugc

SEQ ID NO: 2031 - RNA, 20 nt, Homo sapiens
uugaugaaugccuauccuuc

SEQ ID NO: 2032 - RNA, 20 nt, Homo sapiens
ugcauaugcuaugaggcagu

SEQ ID NO: 2033 - RNA, 20 nt, Homo sapiens
uaugccuccaucgauauuag

SEQ ID NO: 2034 - RNA, 20 nt, Homo sapiens
aguugacauagauacucuuu

SEQ ID NO: 2035 - RNA, 20 nt, Homo sapiens
uuuagucuagggaaagucau

SEQ ID NO: 2036 - RNA, 20 nt, Homo sapiens
uccacacuugcccaaaugua

SEQ ID NO: 2037 - RNA, 20 nt, Homo sapiens
ucuucugucacccgauuuuc

SEQ ID NO: 2038 - RNA, 20 nt, Homo sapiens
auagaaaauauaagaugaua

SEQ ID NO: 2039 - RNA, 20 nt, Homo sapiens
uaugcugcacaaccuuuucu

SEQ ID NO: 2040 - RNA, 20 nt, Homo sapiens
uggauuugacuucuguucug

SEQ ID NO: 2041 - RNA, 20 nt, Homo sapiens
gacuucuguucuguuucuua

SEQ ID NO: 2042 - RNA, 20 nt, Homo sapiens
cuuucauuuaauccauuguc

SEQ ID NO: 2043 - RNA, 20 nt, Homo sapiens
aaggaugacaugcuuucuuc

SEQ ID NO: 2044 - RNA, 20 nt, Homo sapiens
agguagaggacauugcuuuu

SEQ ID NO: 2045 - RNA, 20 nt, Homo sapiens
uuuguaucuguuggucuucc

SEQ ID NO: 2046 - RNA, 20 nt, Homo sapiens
auucccaaagaccaguggau

SEQ ID NO: 2047 - RNA, 20 nt, Homo sapiens
aagaccagaacaagaauucu

SEQ ID NO: 2048 - RNA, 20 nt, Homo sapiens
uaaagcauaugaauggaacg

SEQ ID NO: 2049 - RNA, 20 nt, Homo sapiens
cuggauuugacuucuguucu

SEQ ID NO: 2050 - RNA, 20 nt, Homo sapiens
uagggaaaguguguauuugg

SEQ ID NO: 2051 - RNA, 20 nt, Homo sapiens
gcaugcauuagcucacuuuc

SEQ ID NO: 2052 - RNA, 20 nt, Homo sapiens
uuggucuuccuaauaugacu

SEQ ID NO: 2053 - RNA, 20 nt, Homo sapiens
guuucuaaugauuacucauu

SEQ ID NO: 2054 - RNA, 20 nt, Homo sapiens
uuacacaaggacccuuuacc

SEQ ID NO: 2055 - RNA, 20 nt, Homo sapiens
uugaaaccaagaaucuccuu

SEQ ID NO: 2056 - RNA, 20 nt, Homo sapiens
ucugauaucauuccuagaac

SEQ ID NO: 2057 - RNA, 20 nt, Homo sapiens
agugccugggaacuggugua

SEQ ID NO: 2058 - RNA, 20 nt, Homo sapiens
ugagaauggcaugcauuagc

SEQ ID NO: 2059 - RNA, 20 nt, Homo sapiens
ugcauuagcucacuuucauu

SEQ ID NO: 2060 - RNA, 20 nt, Homo sapiens
ucacccucugaaguggguac

SEQ ID NO: 2061 - RNA, 20 nt, Homo sapiens
ugaggagguuuuagucuagg

SEQ ID NO: 2062 - RNA, 20 nt, Homo sapiens
uuugcuuggugauauguggg

SEQ ID NO: 2063 - RNA, 20 nt, Homo sapiens
uggggcauauccaguaugau

SEQ ID NO: 2064 - RNA, 20 nt, Homo sapiens
auaugaauggaacgacaaug

SEQ ID NO: 2065 - RNA, 20 nt, Homo sapiens
uuucaugguauagaaaauau

SEQ ID NO: 2066 - RNA, 20 nt, Homo sapiens
uacugaagagaauguccaaa

SEQ ID NO: 2067 - RNA, 20 nt, Homo sapiens
ggcaagagcaaaucauuaug

SEQ ID NO: 2068 - RNA, 20 nt, Homo sapiens
ugcugcacaaccuuuucugc

SEQ ID NO: 2069 - RNA, 20 nt, Homo sapiens
aaagaccagaacaagaauuc

SEQ ID NO: 2070 - RNA, 20 nt, Homo sapiens
aacgacaaugaaauguaccu

SEQ ID NO: 2071 - RNA, 20 nt, Homo sapiens
ugugcgaguggcuaauuuga

SEQ ID NO: 2072 - RNA, 20 nt, Homo sapiens
uuagcaaaggagaaaauaau

SEQ ID NO: 2073 - RNA, 20 nt, Homo sapiens
ggaacagguagaggacauug

SEQ ID NO: 2074 - RNA, 20 nt, Homo sapiens
cuuaaaucuuuuguauuugc

SEQ ID NO: 2075 - RNA, 20 nt, Homo sapiens
uauccacuacaagaaauuca

SEQ ID NO: 2076 - RNA, 20 nt, Homo sapiens
aaaccaaacauagauguuac

SEQ ID NO: 2077 - RNA, 20 nt, Homo sapiens
caaggauucugggaaaauuc

SEQ ID NO: 2078 - RNA, 20 nt, Homo sapiens
accagaacaagaauucuuuu

SEQ ID NO: 2079 - RNA, 20 nt, Homo sapiens
auguuaauuucaugguauag

SEQ ID NO: 2080 - RNA, 20 nt, Homo sapiens
gauaucauuaaaugucaaaa

SEQ ID NO: 2081 - RNA, 20 nt, Homo sapiens
uuaaaugucaaaacuaugac

SEQ ID NO: 2082 - RNA, 20 nt, Homo sapiens
caggcuguucagggauaauc

SEQ ID NO: 2083 - RNA, 20 nt, Homo sapiens
ugucaaggaugacaugcuuu

SEQ ID NO: 2084 - RNA, 20 nt, Homo sapiens
auggugauuugccuacagug

SEQ ID NO: 2085 - RNA, 20 nt, Homo sapiens
uuggacaaaucuguacucuu

SEQ ID NO: 2086 - RNA, 20 nt, Homo sapiens
ucaagaagcacuuugucaag

SEQ ID NO: 2087 - RNA, 20 nt, Homo sapiens
uuuaauuucuuugucacugc

SEQ ID NO: 2088 - RNA, 20 nt, Homo sapiens
gcaaggauugagaauggcau

SEQ ID NO: 2089 - RNA, 20 nt, Homo sapiens
uuggaaucgaucaugcuuuc

SEQ ID NO: 2090 - RNA, 20 nt, Homo sapiens
ucucaugaggagguuuuagu

SEQ ID NO: 2091 - RNA, 20 nt, Homo sapiens
cauuauaugaagaguaugug

SEQ ID NO: 2092 - RNA, 20 nt, Homo sapiens
ucugggaaaauuccaugcua

SEQ ID NO: 2093 - RNA, 20 nt, Homo sapiens
uucaggauccuuaugugcac

SEQ ID NO: 2094 - RNA, 20 nt, Homo sapiens
aggcccucugcacaaaugug

SEQ ID NO: 2095 - DNA, 45 bp, Homo sapiens
tgacatagatactctttggatttcataccatgtggaggctttctt

SEQ ID NO: 2096 - DNA, 45 bp, Homo sapiens
aaagatatcattaaatgtcaaaactatgactctgttcagaaaaaa

SEQ ID NO: 2097 - DNA, 45 bp, Homo sapiens
atcagaaccctggaccctagcattggaaaatgttgtaggagcaaa

SEQ ID NO: 2098 - DNA, 45 bp, Homo sapiens
aggtgattttgttgtatgtaaatgttaatttcatggtatagaaaa

SEQ ID NO: 2099 - DNA, 45 bp, Homo sapiens
ggatttgacttctgttctgtttcttaataaggattttgtattaga

SEQ ID NO: 2100 - DNA, 45 bp, Homo sapiens
atggctacagaggatcaggagttgacatagatactctttggattt

SEQ ID NO: 2101 - DNA, 45 bp, Homo sapiens
ctgttccatgtttctaatgattactcattcattcgatattacaca

SEQ ID NO: 2102 - DNA, 45 bp, Homo sapiens
aatccttatgcctccatcgatattagcaaaggagaaaataatcca

SEQ ID NO: 2103 - DNA, 45 bp, Homo sapiens
tgtaaatgttaatttcatggtatagaaaatataagatgataaaga

SEQ ID NO: 2104 - DNA, 45 bp, Homo sapiens
tgtgcgagtggctaatttgaaaccaagaatctcctttaatttctt

SEQ ID NO: 2105 - DNA, 45 bp, Homo sapiens
gtttttggagttgtgatgggagtgatagtggttggcattgtcatc

SEQ ID NO: 2106 - DNA, 45 bp, Homo sapiens
atgtggaacatacctttgaagagattaaaccattatatgaacatc

SEQ ID NO: 2107 - DNA, 45 bp, Homo sapiens
tcctcttgaggtgattttgttgtatgtaaatgttaatttcatggt

SEQ ID NO: 2108 - DNA, 45 bp, Homo sapiens
tatgtaaatgttaatttcatggtatagaaaatataagatgataaa

SEQ ID NO: 2109 - DNA, 45 bp, Homo sapiens
agtatttatttctgtctctggatttgacttctgttctgtttctta

SEQ ID NO: 2110 - DNA, 45 bp, Homo sapiens
tacctttgaagagattaaaccattatatgaacatcttcatgccta

SEQ ID NO: 2111 - DNA, 45 bp, Homo sapiens
gaaaaatctatgtttttcctcttgaggtgattttgttgtatgtaa

SEQ ID NO: 2112 - DNA, 45 bp, Homo sapiens
agatgataaagatatcattaaatgtcaaaactatgactctgttca

SEQ ID NO: 2113 - DNA, 45 bp, Homo sapiens
atcgatattagcaaaggagaaaataatccaggattccaaaacact

SEQ ID NO: 2114 - DNA, 45 bp, Homo sapiens
tgtccaaagacaacatggccaaggagagagcatcttcattgacat

SEQ ID NO: 2115 - DNA, 45 bp, Homo sapiens
ggtctcacaggctgttcagggataatctaaatgtaaatgtctgtt

SEQ ID NO: 2116 - DNA, 45 bp, Homo sapiens
ttctgtcacccgattttcaagaagacaatgaaacagaaataaact

SEQ ID NO: 2117 - DNA, 45 bp, Homo sapiens
attcgatattacacaaggaccctttaccaattccagtttcaagaa

SEQ ID NO: 2118 - DNA, 45 bp, Homo sapiens
agcattggaaaatgttgtaggagcaaagaacatgaatgtaaggcc

SEQ ID NO: 2119 - DNA, 45 bp, Homo sapiens
attggaaaatgttgtaggagcaaagaacatgaatgtaaggccact

SEQ ID NO: 2120 - DNA, 45 bp, Homo sapiens
aaataaagcaagaagtggagaaaatccttatgcctccatcgatat

SEQ ID NO: 2121 - DNA, 45 bp, Homo sapiens
tgtttttcctcttgaggtgattttgttgtatgtaaatgttaattt

SEQ ID NO: 2122 - DNA, 45 bp, Homo sapiens
ggaaatcatgtcactttctgcagccacacctaagcatttaaaatc

SEQ ID NO: 2123 - DNA, 45 bp, Homo sapiens
atatcattaaatgtcaaaactatgactctgttcagaaaaaaaatt

SEQ ID NO: 2124 - DNA, 45 bp, Homo sapiens
ggctgttcagggataatctaaatgtaaatgtctgttgaatttctg

SEQ ID NO: 2125 - DNA, 45 bp, Homo sapiens
tctcatgaggaggttttagtctagggaaagtcattcagtggatgt

SEQ ID NO: 2126 - DNA, 45 bp, Homo sapiens
caaggatatatcattggagcaagtgttggatcttgtatggaatat

SEQ ID NO: 2127 - DNA, 45 bp, Homo sapiens
atttctgtctctggatttgacttctgttctgtttcttaataagga

SEQ ID NO: 2128 - DNA, 45 bp, Homo sapiens
gtttcttaataaggattttgtattagagtatattagggaaagtgt

SEQ ID NO: 2129 - DNA, 45 bp, Homo sapiens
ggtcggcaagcagctgaggccattatatgaagagtatgtggtctt

SEQ ID NO: 2130 - DNA, 45 bp, Homo sapiens
gtggctaatttgaaaccaagaatctcctttaatttctttgtcact

SEQ ID NO: 2131 - DNA, 45 bp, Homo sapiens
ggattccaaaacactgatgatgttcagacctccttttagaaaaat

SEQ ID NO: 2132 - DNA, 45 bp, Homo sapiens
gtatttatttctgtctctggatttgacttctgttctgtttcttaa

SEQ ID NO: 2133 - DNA, 45 bp, Homo sapiens
gtaactgctgctcagtccaccattgaggaacaggccaagacattt

SEQ ID NO: 2134 - DNA, 45 bp, Homo sapiens
aatccacaagaatgcttattacttgaaccaggtttgaatgaaata

SEQ ID NO: 2135 - DNA, 45 bp, Homo sapiens
agaatgcttattacttgaaccaggtttgaatgaaataatggcaaa

SEQ ID NO: 2136 - DNA, 45 bp, Homo sapiens
gaacaagaattcttttgtgggatggagtaccgactggagtccata

SEQ ID NO: 2137 - DNA, 45 bp, Homo sapiens
ctatgtttttcctcttgaggtgattttgttgtatgtaaatgttaa

SEQ ID NO: 2138 - DNA, 45 bp, Homo sapiens
gtctcttaaatcttttgtatttgctcacagtgtttgagcagtgct

SEQ ID NO: 2139 - DNA, 45 bp, Homo sapiens
tccacaagaatgcttattacttgaaccaggtttgaatgaaataat

SEQ ID NO: 2140 - DNA, 45 bp, Homo sapiens
gtcttgaaaaatgagatggcaagagcaaatcattatgaggactat

SEQ ID NO: 2141 - DNA, 45 bp, Homo sapiens
tttgacagttccctttggacagaaaccaaacatagatgttactga

SEQ ID NO: 2142 - DNA, 45 bp, Homo sapiens
tcttaataaggattttgtattagagtatattagggaaagtgtgta

SEQ ID NO: 2143 - DNA, 45 bp, Homo sapiens
gttgaaaacaaggatatatcattggagcaagtgttggatcttgta

SEQ ID NO: 2144 - DNA, 45 bp, Homo sapiens
gtgattttgttgtatgtaaatgttaatttcatggtatagaaaata

SEQ ID NO: 2145 - DNA, 45 bp, Homo sapiens
acttctgttctgtttcttaataaggattttgtattagagtatatt

SEQ ID NO: 2146 - DNA, 45 bp, Homo sapiens
ttgaatagcgcccaacccaagttcaaaggctgataagagagaaaa

SEQ ID NO: 2147 - DNA, 45 bp, Homo sapiens
cacgattgttgggactctgccatttacttacatgttagagaagtg

SEQ ID NO: 2148 - DNA, 45 bp, Homo sapiens
aaagaacatgaatgtaaggccactgctcaactactttgagccctt

SEQ ID NO: 2149 - DNA, 45 bp, Homo sapiens
gatcttggctcacaggggacgatgtcaagctcttcctggctcctt

SEQ ID NO: 2150 - DNA, 45 bp, Homo sapiens
ttggacaagtttaaccacgaagccgaagacctgttctatcaaagt

SEQ ID NO: 2151 - DNA, 45 bp, Homo sapiens
ccaaatgtatccactacaagaaattcagaatctcacagtcaagct

SEQ ID NO: 2152 - DNA, 45 bp, Homo sapiens
cactgcacctaaaaatgtgtctgatatcattcctagaactgaagt

SEQ ID NO: 2153 - DNA, 45 bp, Homo sapiens
gtctcacaggctgttcagggataatctaaatgtaaatgtctgttg

SEQ ID NO: 2154 - DNA, 45 bp, Homo sapiens
actcccagagcatgcctgatagaaactcatttctactgttctcta

SEQ ID NO: 2155 - DNA, 45 bp, Homo sapiens
atggggcatatccagtatgatatggcatatgctgcacaacctttt

SEQ ID NO: 2156 - DNA, 45 bp, Homo sapiens
gctcaaacaagcactcacgattgttgggactctgccatttactta

SEQ ID NO: 2157 - DNA, 45 bp, Homo sapiens
ttccaaaacactgatgatgttcagacctccttttagaaaaatcta

SEQ ID NO: 2158 - DNA, 45 bp, Homo sapiens
catggtatagaaaatataagatgataaagatatcattaaatgtca

SEQ ID NO: 2159 - DNA, 45 bp, Homo sapiens
atagaaaatataagatgataaagatatcattaaatgtcaaaacta

SEQ ID NO: 2160 - DNA, 45 bp, Homo sapiens
tttgacttctgttctgtttcttaataaggattttgtattagagta

SEQ ID NO: 2161 - DNA, 45 bp, Homo sapiens
tttcttaataaggattttgtattagagtatattagggaaagtgtg

SEQ ID NO: 2162 - DNA, 45 bp, Homo sapiens
aaagttcacttgcttcttggaattataacaccaatattactgaag

SEQ ID NO: 2163 - DNA, 45 bp, Homo sapiens
atcaggatgtcccggagccgtatcaatgatgctttccgtctgaat

SEQ ID NO: 2164 - DNA, 45 bp, Homo sapiens
ttgctttcagtatttatttctgtctctggatttgacttctgttct

SEQ ID NO: 2165 - DNA, 45 bp, Homo sapiens
tgtttgagcagtgctgagcacaaagcagacactcaataaatgcta

SEQ ID NO: 2166 - DNA, 45 bp, Homo sapiens
aaaatataagatgataaagatatcattaaatgtcaaaactatgac

SEQ ID NO: 2167 - DNA, 45 bp, Homo sapiens
ctttcttacttccacgtgaccttgactgagttttgaatagcgccc

SEQ ID NO: 2168 - DNA, 45 bp, Homo sapiens
ccagttgattgaagatgtggaacatacctttgaagagattaaacc

SEQ ID NO: 2169 - DNA, 45 bp, Homo sapiens
cgatcatctgttgcatatgctatgaggcagtactttttaaaagta

SEQ ID NO: 2170 - DNA, 45 bp, Homo sapiens
taaccagccccctgtttccatatggctgattgtttttggagttgt

SEQ ID NO: 2171 - DNA, 45 bp, Homo sapiens
tggcaaacagtttagactacaatgagaggctctgggcttgggaaa

SEQ ID NO: 2172 - DNA, 45 bp, Homo sapiens
atgtgcgagtggctaatttgaaaccaagaatctcctttaatttct

SEQ ID NO: 2173 - DNA, 45 bp, Homo sapiens
ctaaatgtaaatgtctgttgaatttctgaagttgaaaacaaggat

SEQ ID NO: 2174 - DNA, 45 bp, Homo sapiens
cctctgaagtgggtacccagtctcttaaatcttttgtatttgctc

SEQ ID NO: 2175 - DNA, 45 bp, Homo sapiens
tgtttttggagttgtgatgggagtgatagtggttggcattgtcat

SEQ ID NO: 2176 - DNA, 45 bp, Homo sapiens
aggattccaaaacactgatgatgttcagacctccttttagaaaaa

SEQ ID NO: 2177 - DNA, 45 bp, Homo sapiens
ctatcaaagttcacttgcttcttggaattataacaccaatattac

SEQ ID NO: 2178 - DNA, 45 bp, Homo sapiens
ctgttcagggataatctaaatgtaaatgtctgttgaatttctgaa

SEQ ID NO: 2179 - DNA, 45 bp, Homo sapiens
gtccaaaacatgaataatgctggggacaaatggtctgccttttta

SEQ ID NO: 2180 - DNA, 45 bp, Homo sapiens
tcttctgtcacccgattttcaagaagacaatgaaacagaaataaa

SEQ ID NO: 2181 - DNA, 45 bp, Homo sapiens
aagcctaaaatcagctcttggagataaagcatatgaatggaacga

SEQ ID NO: 2182 - DNA, 45 bp, Homo sapiens
tatgaatggaacgacaatgaaatgtacctgttccgatcatctgtt

SEQ ID NO: 2183 - DNA, 45 bp, Homo sapiens
tttcatggtatagaaaatataagatgataaagatatcattaaatg

SEQ ID NO: 2184 - DNA, 45 bp, Homo sapiens
tctggatttgacttctgttctgtttcttaataaggattttgtatt

SEQ ID NO: 2185 - DNA, 45 bp, Homo sapiens
caagtactatggtgatttgcctacagtgatgtttggaatcgatca

SEQ ID NO: 2186 - DNA, 45 bp, Homo sapiens
gctgataagagagaaaatctcatgaggaggttttagtctagggaa

SEQ ID NO: 2187 - DNA, 45 bp, Homo sapiens
atggtatagaaaatataagatgataaagatatcattaaatgtcaa

SEQ ID NO: 2188 - DNA, 45 bp, Homo sapiens
tgatttgcctacagtgatgtttggaatcgatcatgctttcttcaa

SEQ ID NO: 2189 - DNA, 45 bp, Homo sapiens
ttttaaaggaacagtccacacttgcccaaatgtatccactacaag

SEQ ID NO: 2190 - DNA, 45 bp, Homo sapiens
gggattattggagaggagactatgaagtaaatggggtagatggct

SEQ ID NO: 2191 - DNA, 45 bp, Homo sapiens
ccaaggagagagcatcttcattgacattgctttcagtatttattt

SEQ ID NO: 2192 - DNA, 45 bp, Homo sapiens
ggataatctaaatgtaaatgtctgttgaatttctgaagttgaaaa

SEQ ID NO: 2193 - DNA, 45 bp, Homo sapiens
gtgcctgggaactggtgtagctgcaaggattgagaatggcatgca

SEQ ID NO: 2194 - DNA, 45 bp, Homo sapiens
tacagaggatcaggagttgacatagatactctttggatttcatac

SEQ ID NO: 2195 - DNA, 45 bp, Homo sapiens
tattactgaagagaatgtccaaaacatgaataatgctggggacaa

SEQ ID NO: 2196 - DNA, 45 bp, Homo sapiens
gtatagaaaatataagatgataaagatatcattaaatgtcaaaac

SEQ ID NO: 2197 - DNA, 45 bp, Homo sapiens
ttcttaataaggattttgtattagagtatattagggaaagtgtgt

SEQ ID NO: 2198 - DNA, 45 bp, Homo sapiens
ggatgacatgctttcttcacagtaactcagttcaagtactatggt

SEQ ID NO: 2199 - DNA, 45 bp, Homo sapiens
catggctacagaggatcaggagttgacatagatactctttggatt

SEQ ID NO: 2200 - DNA, 45 bp, Homo sapiens
gattttggacaaatctgtactctttgacagttccctttggacaga

SEQ ID NO: 2201 - DNA, 45 bp, Homo sapiens
tttctgctaagaaatggagctaatgaaggattccatgaagctgtt

SEQ ID NO: 2202 - DNA, 45 bp, Homo sapiens
actgctcaactactttgagcccttatttacctggctgaaagacca

SEQ ID NO: 2203 - DNA, 45 bp, Homo sapiens
atcatctgttgcatatgctatgaggcagtactttttaaaagtaaa

SEQ ID NO: 2204 - DNA, 45 bp, Homo sapiens
tgaggtgattttgttgtatgtaaatgttaatttcatggtatagaa

SEQ ID NO: 2205 - DNA, 45 bp, Homo sapiens
gccaaggagagagcatcttcattgacattgctttcagtatttatt

SEQ ID NO: 2206 - DNA, 45 bp, Homo sapiens
tagggaaagtgtgtatttggtctcacaggctgttcagggataatc

SEQ ID NO: 2207 - DNA, 45 bp, Homo sapiens
aagttcaaaggctgataagagagaaaatctcatgaggaggtttta

SEQ ID NO: 2208 - DNA, 45 bp, Homo sapiens
ttcctgacagctcatcatgagatggggcatatccagtatgatatg

SEQ ID NO: 2209 - DNA, 45 bp, Homo sapiens
atctctgttccatgtttctaatgattactcattcattcgatatta

SEQ ID NO: 2210 - DNA, 45 bp, Homo sapiens
ggatgtcccggagccgtatcaatgatgctttccgtctgaatgaca

SEQ ID NO: 2211 - DNA, 45 bp, Homo sapiens
tgttgaatttctgaagttgaaaacaaggatatatcattggagcaa

SEQ ID NO: 2212 - DNA, 45 bp, Homo sapiens
cgcggccagttgattgaagatgtggaacatacctttgaagagatt

SEQ ID NO: 2213 - DNA, 45 bp, Homo sapiens
gatgtggaacatacctttgaagagattaaaccattatatgaacat

SEQ ID NO: 2214 - DNA, 45 bp, Homo sapiens
cctggctgaaagaccagaacaagaattcttttgtgggatggagta

SEQ ID NO: 2215 - DNA, 45 bp, Homo sapiens
tgcctccatcgatattagcaaaggagaaaataatccaggattcca

SEQ ID NO: 2216 - DNA, 45 bp, Homo sapiens
tgaatttctgaagttgaaaacaaggatatatcattggagcaagtg

SEQ ID NO: 2217 - DNA, 45 bp, Homo sapiens
atgtttggaatcgatcatgctttcttcaaggtgacaggtctaaag

SEQ ID NO: 2218 - DNA, 45 bp, Homo sapiens
ttttgaatagcgcccaacccaagttcaaaggctgataagagagaa

SEQ ID NO: 2219 - DNA, 45 bp, Homo sapiens
agattaaaccattatatgaacatcttcatgcctatgtgagggcaa

SEQ ID NO: 2220 - DNA, 45 bp, Homo sapiens
gtcatcctgatcttcactgggatcagagatcggaagaagaaaaat

SEQ ID NO: 2221 - DNA, 45 bp, Homo sapiens
gaatcgatcatgctttcttcaaggtgacaggtctaaagagagaag

SEQ ID NO: 2222 - DNA, 45 bp, Homo sapiens
tcagctgcaggctcttcagcaaaatgggtcttcagtgctctcaga

SEQ ID NO: 2223 - DNA, 45 bp, Homo sapiens
ttgaatgaaataatggcaaacagtttagactacaatgagaggctc

SEQ ID NO: 2224 - DNA, 45 bp, Homo sapiens
acctttgaagagattaaaccattatatgaacatcttcatgcctat

SEQ ID NO: 2225 - DNA, 45 bp, Homo sapiens
tagattttggacaaatctgtactctttgacagttccctttggaca

SEQ ID NO: 2226 - DNA, 45 bp, Homo sapiens
gacaaatctgtactctttgacagttccctttggacagaaaccaaa

SEQ ID NO: 2227 - DNA, 45 bp, Homo sapiens
tttcaagaagacaatgaaacagaaataaacttcctgctcaaacaa

SEQ ID NO: 2228 - DNA, 45 bp, Homo sapiens
cattgacattgctttcagtatttatttctgtctctggatttgact

SEQ ID NO: 2229 - DNA, 45 bp, Homo sapiens
ttcttcacagtaactcagttcaagtactatggtgatttgcctaca

SEQ ID NO: 2230 - DNA, 45 bp, Homo sapiens
attactgaagagaatgtccaaaacatgaataatgctggggacaaa

SEQ ID NO: 2231 - DNA, 45 bp, Homo sapiens
tatgtgagggcaaagttgatgaatgcctatccttcctatatcagt

SEQ ID NO: 2232 - DNA, 45 bp, Homo sapiens
gttccgatcatctgttgcatatgctatgaggcagtactttttaaa

SEQ ID NO: 2233 - DNA, 45 bp, Homo sapiens
agtggagaaaatccttatgcctccatcgatattagcaaaggagaa

SEQ ID NO: 2234 - DNA, 45 bp, Homo sapiens
ctacagaggatcaggagttgacatagatactctttggatttcata

SEQ ID NO: 2235 - DNA, 45 bp, Homo sapiens
atctcatgaggaggttttagtctagggaaagtcattcagtggatg

SEQ ID NO: 2236 - DNA, 45 bp, Homo sapiens
tttttaaaggaacagtccacacttgcccaaatgtatccactacaa

SEQ ID NO: 2237 - DNA, 45 bp, Homo sapiens
tttaaaatccattggtcttctgtcacccgattttcaagaagacaa

SEQ ID NO: 2238 - DNA, 45 bp, Homo sapiens
tgttaatttcatggtatagaaaatataagatgataaagatatcat

SEQ ID NO: 2239 - DNA, 45 bp, Homo sapiens
cagtatgatatggcatatgctgcacaaccttttctgctaagaaat

SEQ ID NO: 2240 - DNA, 45 bp, Homo sapiens
atttatttctgtctctggatttgacttctgttctgtttcttaata

SEQ ID NO: 2241 - DNA, 45 bp, Homo sapiens
tctgtctctggatttgacttctgttctgtttcttaataaggattt

SEQ ID NO: 2242 - DNA, 45 bp, Homo sapiens
gcatgcattagctcactttcatttaatccattgtcaaggatgaca

SEQ ID NO: 2243 - DNA, 45 bp, Homo sapiens
atttaatccattgtcaaggatgacatgctttcttcacagtaactc

SEQ ID NO: 2244 - DNA, 45 bp, Homo sapiens
aagaatccagggaacaggtagaggacattgctttttcacttccaa

SEQ ID NO: 2245 - DNA, 45 bp, Homo sapiens
gaggccgagaagttctttgtatctgttggtcttcctaatatgact

SEQ ID NO: 2246 - DNA, 45 bp, Homo sapiens
gtctttaaaggggaaattcccaaagaccagtggatgaaaaagtgg

SEQ ID NO: 2247 - DNA, 45 bp, Homo sapiens
tatttacctggctgaaagaccagaacaagaattcttttgtgggat

SEQ ID NO: 2248 - DNA, 45 bp, Homo sapiens
atcagctcttggagataaagcatatgaatggaacgacaatgaaat

SEQ ID NO: 2249 - DNA, 45 bp, Homo sapiens
tatttatttctgtctctggatttgacttctgttctgtttcttaat

SEQ ID NO: 2250 - DNA, 45 bp, Homo sapiens
tgtattagagtatattagggaaagtgtgtatttggtctcacaggc

SEQ ID NO: 2251 - DNA, 45 bp, Homo sapiens
caaggattgagaatggcatgcattagctcactttcatttaatcca

SEQ ID NO: 2252 - DNA, 45 bp, Homo sapiens
agttctttgtatctgttggtcttcctaatatgactcaaggattct

SEQ ID NO: 2253 - DNA, 45 bp, Homo sapiens
gcatctctgttccatgtttctaatgattactcattcattcgatat

SEQ ID NO: 2254 - DNA, 45 bp, Homo sapiens
ctcattcattcgatattacacaaggaccctttaccaattccagtt

SEQ ID NO: 2255 - DNA, 45 bp, Homo sapiens
gtgcgagtggctaatttgaaaccaagaatctcctttaatttcttt

SEQ ID NO: 2256 - DNA, 45 bp, Homo sapiens
gcacctaaaaatgtgtctgatatcattcctagaactgaagttgaa

SEQ ID NO: 2257 - DNA, 45 bp, Homo sapiens
atcacttgtaaggacagtgcctgggaactggtgtagctgcaagga

SEQ ID NO: 2258 - DNA, 45 bp, Homo sapiens
tgtagctgcaaggattgagaatggcatgcattagctcactttcat

SEQ ID NO: 2259 - DNA, 45 bp, Homo sapiens
ggattgagaatggcatgcattagctcactttcatttaatccattg

SEQ ID NO: 2260 - DNA, 45 bp, Homo sapiens
attccaactgtatgttcaccctctgaagtgggtacccagtctctt

SEQ ID NO: 2261 - DNA, 45 bp, Homo sapiens
agagagaaaatctcatgaggaggttttagtctagggaaagtcatt

SEQ ID NO: 2262 - DNA, 45 bp, Homo sapiens
atgcctccctgctcatttgcttggtgatatgtggggtagattttg

SEQ ID NO: 2263 - DNA, 45 bp, Homo sapiens
cagctcatcatgagatggggcatatccagtatgatatggcatatg

SEQ ID NO: 2264 - DNA, 45 bp, Homo sapiens
tcttggagataaagcatatgaatggaacgacaatgaaatgtacct

SEQ ID NO: 2265 - DNA, 45 bp, Homo sapiens
gtatgtaaatgttaatttcatggtatagaaaatataagatgataa

SEQ ID NO: 2266 - DNA, 45 bp, Homo sapiens
ttataacaccaatattactgaagagaatgtccaaaacatgaataa

SEQ ID NO: 2267 - DNA, 45 bp, Homo sapiens
cttgaaaaatgagatggcaagagcaaatcattatgaggactatgg

SEQ ID NO: 2268 - DNA, 45 bp, Homo sapiens
gtatgatatggcatatgctgcacaaccttttctgctaagaaatgg

SEQ ID NO: 2269 - DNA, 45 bp, Homo sapiens
ttatttacctggctgaaagaccagaacaagaattcttttgtggga

SEQ ID NO: 2270 - DNA, 45 bp, Homo sapiens
aaagcatatgaatggaacgacaatgaaatgtacctgttccgatca

SEQ ID NO: 2271 - DNA, 45 bp, Homo sapiens
ttttggggaggaggatgtgcgagtggctaatttgaaaccaagaat

SEQ ID NO: 2272 - DNA, 45 bp, Homo sapiens
atgcctccatcgatattagcaaaggagaaaataatccaggattcc

SEQ ID NO: 2273 - DNA, 45 bp, Homo sapiens
gagagaagaatccagggaacaggtagaggacattgctttttcact

SEQ ID NO: 2274 - DNA, 45 bp, Homo sapiens
gtgggtacccagtctcttaaatcttttgtatttgctcacagtgtt

SEQ ID NO: 2275 - DNA, 45 bp, Homo sapiens
acacttgcccaaatgtatccactacaagaaattcagaatctcaca

SEQ ID NO: 2276 - DNA, 45 bp, Homo sapiens
gttccctttggacagaaaccaaacatagatgttactgatgcaatg

SEQ ID NO: 2277 - DNA, 45 bp, Homo sapiens
cttcctaatatgactcaaggattctgggaaaattccatgctaacg

SEQ ID NO: 2278 - DNA, 45 bp, Homo sapiens
ttacctggctgaaagaccagaacaagaattcttttgtgggatgga

SEQ ID NO: 2279 - DNA, 45 bp, Homo sapiens
ttttgttgtatgtaaatgttaatttcatggtatagaaaatataag

SEQ ID NO: 2280 - DNA, 45 bp, Homo sapiens
atataagatgataaagatatcattaaatgtcaaaactatgactct

SEQ ID NO: 2281 - DNA, 45 bp, Homo sapiens
atgataaagatatcattaaatgtcaaaactatgactctgttcaga

SEQ ID NO: 2282 - DNA, 45 bp, Homo sapiens
gtgtatttggtctcacaggctgttcagggataatctaaatgtaaa

SEQ ID NO: 2283 - DNA, 45 bp, Homo sapiens
tttcatttaatccattgtcaaggatgacatgctttcttcacagta

SEQ ID NO: 2284 - DNA, 45 bp, Homo sapiens
ctcagttcaagtactatggtgatttgcctacagtgatgtttggaa

SEQ ID NO: 2285 - DNA, 45 bp, Homo sapiens
tatgtggggtagattttggacaaatctgtactctttgacagttcc

SEQ ID NO: 2286 - DNA, 45 bp, Homo sapiens
ttaccaattccagtttcaagaagcactttgtcaagcagctaaaca

SEQ ID NO: 2287 - DNA, 45 bp, Homo sapiens
aaaccaagaatctcctttaatttctttgtcactgcacctaaaaat

SEQ ID NO: 2288 - DNA, 45 bp, Homo sapiens
ggaactggtgtagctgcaaggattgagaatggcatgcattagctc

SEQ ID NO: 2289 - DNA, 45 bp, Homo sapiens
tgcctacagtgatgtttggaatcgatcatgctttcttcaaggtga

SEQ ID NO: 2290 - DNA, 45 bp, Homo sapiens
tgataagagagaaaatctcatgaggaggttttagtctagggaaag

SEQ ID NO: 2291 - DNA, 45 bp, Homo sapiens
gcaagcagctgaggccattatatgaagagtatgtggtcttgaaaa

SEQ ID NO: 2292 - DNA, 45 bp, Homo sapiens
atatgactcaaggattctgggaaaattccatgctaacggacccag

SEQ ID NO: 2293 - DNA, 45 bp, Homo sapiens
ctggggaagggcgacttcaggatccttatgtgcacaaaggtgaca

SEQ ID NO: 2294 - DNA, 45 bp, Homo sapiens
agcagctaaacatgaaggccctctgcacaaatgtgacatctcaaa

SEQ ID NO: 2295 - RNA, 20 nt, Homo sapiens
ugugaaaaugaauaucaugc

SEQ ID NO: 2296 - RNA, 20 nt, Homo sapiens
accuucauuuaacucuuuga

SEQ ID NO: 2297 - RNA, 20 nt, Homo sapiens
ucguccuugacgucguuuua

SEQ ID NO: 2298 - RNA, 20 nt, Homo sapiens
ggagccggauaccaaguaga

SEQ ID NO: 2299 - RNA, 20 nt, Homo sapiens
uaccacagugaugccuguuc

SEQ ID NO: 2300 - RNA, 20 nt, Homo sapiens
ucaugcaaauaaauuaugca

SEQ ID NO: 2301 - RNA, 20 nt, Homo sapiens
uugaaacuguaucaucuuug

SEQ ID NO: 2302 - RNA, 20 nt, Homo sapiens
gccggcaaugucgauaucua

SEQ ID NO: 2303 - RNA, 20 nt, Homo sapiens
uguaauggugaaaacgucuu

SEQ ID NO: 2304 - RNA, 20 nt, Homo sapiens
gguggccuauuucagcugcu

SEQ ID NO: 2305 - RNA, 20 nt, Homo sapiens
acagcuaggacuuaaccuug

SEQ ID NO: 2306 - RNA, 20 nt, Homo sapiens
caguuuaagguacacuguuu

SEQ ID NO: 2307 - RNA, 20 nt, Homo sapiens
gccgccagagcaggauugug

SEQ ID NO: 2308 - RNA, 20 nt, Homo sapiens
ccagccaugaucugugccgg

SEQ ID NO: 2309 - RNA, 20 nt, Homo sapiens
uccaucaucacccccgagug

SEQ ID NO: 2310 - RNA, 20 nt, Homo sapiens
augaucugugccggcuuccu

SEQ ID NO: 2311 - RNA, 20 nt, Homo sapiens
gcuuugaacucagggucacc

SEQ ID NO: 2312 - RNA, 20 nt, Homo sapiens
aggagaaagggaagaccuca

SEQ ID NO: 2313 - RNA, 20 nt, Homo sapiens
ccuggcaggucagccugcac

SEQ ID NO: 2314 - RNA, 20 nt, Homo sapiens
gaggagaaagggaagaccuc

SEQ ID NO: 2315 - RNA, 20 nt, Homo sapiens
caggucagccugcacgucca

SEQ ID NO: 2316 - RNA, 20 nt, Homo sapiens
cauuggacggcauuugcggg

SEQ ID NO: 2317 - RNA, 20 nt, Homo sapiens
gaggcuccaucaucaccccc

SEQ ID NO: 2318 - RNA, 20 nt, Homo sapiens
caugaucugugccggcuucc

SEQ ID NO: 2319 - RNA, 20 nt, Homo sapiens
accagccaugaucugugccg

SEQ ID NO: 2320 - RNA, 20 nt, Mus sp.
uuugucuucaacaaccuucu

SEQ ID NO: 2321 - RNA, 20 nt, Mus sp.
ugcacaauguaccuuuugag

SEQ ID NO: 2322 - RNA, 20 nt, Mus sp.
ugggacagcaacuguucuac

SEQ ID NO: 2323 - RNA, 20 nt, Mus sp.
uuccacugugaaauauauga

SEQ ID NO: 2324 - RNA, 20 nt, Mus sp.
ucaggcaacguugaccucua

SEQ ID NO: 2325 - RNA, 20 nt, Mus sp.
gggaacgugacgguauuuac

SEQ ID NO: 2326 - RNA, 20 nt, Mus sp.
ucugcaagaaaaccaagggc

SEQ ID NO: 2327 - RNA, 20 nt, Mus sp.
uuuggcuuuuaaugaucuag

SEQ ID NO: 2328 - RNA, 20 nt, Mus sp.
uaagcgagaacuggaguagg

SEQ ID NO: 2329 - RNA, 20 nt, Mus sp.
guugacaugacggcccuuuc

SEQ ID NO: 2330 - RNA, 20 nt, Mus sp.
ugcuucuggguuguguuucu

SEQ ID NO: 2331 - DNA, 45 bp, Homo sapiens
actgtaaagttcaattgtgaaaatgaatatcatgcaaataaatta

SEQ ID NO: 2332 - DNA, 45 bp, Homo sapiens
gtctccaagtagtccaccttcatttaactctttgaaactgtatca

SEQ ID NO: 2333 - DNA, 45 bp, Homo sapiens
taatccacatggtcttcgtccttgacgtcgttttacaagaaaaca

SEQ ID NO: 2334 - DNA, 45 bp, Homo sapiens
tctttcatgttctatggagccggataccaagtagaaaaagtgatt

SEQ ID NO: 2335 - DNA, 45 bp, Homo sapiens
atctataaaaaactgtaccacagtgatgcctgttcttcaaaagca

SEQ ID NO: 2336 - DNA, 45 bp, Homo sapiens
ttgtgaaaatgaatatcatgcaaataaattatgcaattttttttt

SEQ ID NO: 2337 - DNA, 45 bp, Homo sapiens
ccttcatttaactctttgaaactgtatcatctttgccaagtaaga

SEQ ID NO: 2338 - DNA, 45 bp, Homo sapiens
aaactgaacacaagtgccggcaatgtcgatatctataaaaaactg

SEQ ID NO: 2339 - DNA, 45 bp, Homo sapiens
catcctaaaaggtgttgtaatggtgaaaacgtcttccttctttat

SEQ ID NO: 2340 - DNA, 45 bp, Homo sapiens
ttgccaagtaagagtggtggcctatttcagctgctttgacaaaat

SEQ ID NO: 2341 - DNA, 45 bp, Homo sapiens
gaaatgaatgattctacagctaggacttaaccttgaaatggaaag

SEQ ID NO: 2342 - DNA, 45 bp, Homo sapiens
gaaatcaaggatgctcagtttaaggtacactgtttccatgttatg

SEQ ID NO: 2343 - DNA, 45 bp, Homo sapiens
tcaacttgaactcaagccgccagagcaggattgtgggcggcgaga

SEQ ID NO: 2344 - DNA, 45 bp, Homo sapiens
gacaacctgatcacaccagccatgatctgtgccggcttcctgcag

SEQ ID NO: 2345 - DNA, 45 bp, Homo sapiens
cacgtgtgcggaggctccatcatcacccccgagtggatcgtgaca

SEQ ID NO: 2346 - DNA, 45 bp, Homo sapiens
ctgatcacaccagccatgatctgtgccggcttcctgcaggggaac

SEQ ID NO: 2347 - DNA, 45 bp, Homo sapiens
gataacagcaagatggctttgaactcagggtcaccaccagctatt

SEQ ID NO: 2348 - DNA, 45 bp, Homo sapiens
ggtggggggccaccgaggagaaagggaagacctcagaagtgctga

SEQ ID NO: 2349 - DNA, 45 bp, Homo sapiens
tcccgggggcctggccctggcaggtcagcctgcacgtccagaacg

SEQ ID NO: 2350 - DNA, 45 bp, Homo sapiens
gggtggggggccaccgaggagaaagggaagacctcagaagtgctg

SEQ ID NO: 2351 - DNA, 45 bp, Homo sapiens
ggggcctggccctggcaggtcagcctgcacgtccagaacgtccac

SEQ ID NO: 2352 - DNA, 45 bp, Homo sapiens
cttaacaatccatggcattggacggcatttgcggggattttgaga

SEQ ID NO: 2353 - DNA, 45 bp, Homo sapiens
acgtccacgtgtgcggaggctccatcatcacccccgagtggatcg

SEQ ID NO: 2354 - DNA, 45 bp, Homo sapiens
cctgatcacaccagccatgatctgtgccggcttcctgcaggggaa

SEQ ID NO: 2355 - DNA, 45 bp, Homo sapiens
tgacaacctgatcacaccagccatgatctgtgccggcttcctgca

SEQ ID NO: 2356 - DNA, 45 bp, Mus sp.
ttgtcccagacttcctttgtcttcaacaaccttctgcaagaaaac

SEQ ID NO: 2357 - DNA, 45 bp, Mus sp.
aattttaacttcctgtgcacaatgtaccttttgagatgattcgaa

SEQ ID NO: 2358 - DNA, 45 bp, Mus sp.
ttgctttggaggttctgggacagcaactgttctacgtctgagatg

SEQ ID NO: 2359 - DNA, 45 bp, Mus sp.
ttctgagctgtgagattccactgtgaaatatatgaataaagtata

SEQ ID NO: 2360 - DNA, 45 bp, Mus sp.
aagctgaatgtgagctcaggcaacgttgacctctataaaaaactc

SEQ ID NO: 2361 - DNA, 45 bp, Mus sp.
agacctggagtatacgggaacgtgacggtatttacagattggatc

SEQ ID NO: 2362 - DNA, 45 bp, Mus sp.
tgtcttcaacaaccttctgcaagaaaaccaagggcctgaatttta

SEQ ID NO: 2363 - DNA, 45 bp, Mus sp.
gaagctgcagacacctttggcttttaatgatctagtgaagccagt

SEQ ID NO: 2364 - DNA, 45 bp, Mus sp.
ccgcctccggagatttaagcgagaactggagtaggtcgtgtactt

SEQ ID NO: 2365 - DNA, 45 bp, Mus sp.
cttgctctcctgcatgttgacatgacggccctttccaagggtgat

SEQ ID NO: 2366 - DNA, 45 bp, Mus sp.
tgatttcagtcaccttgcttctgggttgtgtttcttctcttacta

SEQ ID NO: 2367 - RNA, 20 nt, Homo sapiens
uuggaaaguguaggcuuacc

SEQ ID NO: 2368 - RNA, 20 nt, Mus sp.
cuugaaauguuauauguuau

SEQ ID NO: 2369 - RNA, 20 nt, Mus sp.
uaugauugauauuuauuauu

SEQ ID NO: 2370 - RNA, 20 nt, Mus sp.
uuaaauaaguaaacuuuaag

SEQ ID NO: 2371 - RNA, 20 nt, Mus sp.
gacacuauuuuaauuauuuu

SEQ ID NO: 2372 - RNA, 20 nt, Mus sp.
ggacacuauuuuaauuauuu

SEQ ID NO: 2373 - RNA, 20 nt, Mus sp.
ugggacacuauuuuaauuau

SEQ ID NO: 2374 - RNA, 20 nt, Mus sp.
guggacauuccucacugugg

SEQ ID NO: 2375 - RNA, 20 nt, Mus sp.
ugaagaauuucuaaaaguca

SEQ ID NO: 2376 - RNA, 20 nt, Homo sapiens
augggcaccucagauuguug

SEQ ID NO: 2377 - RNA, 20 nt, Homo sapiens
ucggcaaauguagcaugggc

SEQ ID NO: 2378 - RNA, 20 nt, Mus sp.
gauauaaucaggaaauuugc

SEQ ID NO: 2379 - RNA, 20 nt, Homo sapiens
ugagguauaccuagaguacc

SEQ ID NO: 2380 - RNA, 20 nt, Homo sapiens
ggugaaaaucaucacugguc

SEQ ID NO: 2381 - RNA, 20 nt, Homo sapiens
cuugccuggugaaaaucauc

SEQ ID NO: 2382 - RNA, 20 nt, Mus sp.
ugugcaauggcaauucugau

SEQ ID NO: 2383 - RNA, 20 nt, Homo sapiens
ugaaccuuccaaagauggcu

SEQ ID NO: 2384 - RNA, 20 nt, Homo sapiens
acuggcagaaaacaaccuga

SEQ ID NO: 2385 - RNA, 20 nt, Homo sapiens
gaaagcagcaaagaggcacu

SEQ ID NO: 2386 - RNA, 20 nt, Homo sapiens
ucagcccugagaaaggagac

SEQ ID NO: 2387 - RNA, 20 nt, Mus sp.
ugcuaauuuaaauauguuuu

SEQ ID NO: 2388 - RNA, 20 nt, Mus sp.
cuuggaauguauaaguuuac

SEQ ID NO: 2389 - DNA, 45 bp, Homo sapiens
gagccagatcatttcttggaaagtgtaggcttacctcaaataaat

SEQ ID NO: 2390 - DNA, 45 bp, Mus sp.
ttttatgaagtgtcacttgaaatgttatatgttatagttttgaaa

SEQ ID NO: 2391 - DNA, 45 bp, Mus sp.
aactttaagttaatttatgattgatatttattatttttatgaagt

SEQ ID NO: 2392 - DNA, 45 bp, Mus sp.
taatttattgataatttaaataagtaaactttaagttaatttatg

SEQ ID NO: 2393 - DNA, 45 bp, Mus sp.
caatatgaatgttgggacactattttaattatttttaatttattg

SEQ ID NO: 2394 - DNA, 45 bp, Mus sp.
acaatatgaatgttgggacactattttaattatttttaatttatt

SEQ ID NO: 2395 - DNA, 45 bp, Mus sp.
tgacaatatgaatgttgggacactattttaattatttttaattta

SEQ ID NO: 2396 - DNA, 45 bp, Mus sp.
taagcatatcagtttgtggacattcctcactgtggtcagaaaata

SEQ ID NO: 2397 - DNA, 45 bp, Mus sp.
catcttgaaatcacttgaagaatttctaaaagtcactttgagatc

SEQ ID NO: 2398 - DNA, 45 bp, Homo sapiens
ttcggcaaatgtagcatgggcacctcagattgttgttgttaatgg

SEQ ID NO: 2399 - DNA, 45 bp, Homo sapiens
cagcctgagggctcttcggcaaatgtagcatgggcacctcagatt

SEQ ID NO: 2400 - DNA, 45 bp, Mus sp.
gatgctaccaaactggatataatcaggaaatttgcctattgaaaa

SEQ ID NO: 2401 - DNA, 45 bp, Homo sapiens
tggtcttttggagtttgaggtatacctagagtacctccagaacag

SEQ ID NO: 2402 - DNA, 45 bp, Homo sapiens
tgaggagacttgcctggtgaaaatcatcactggtcttttggagtt

SEQ ID NO: 2403 - DNA, 45 bp, Homo sapiens
gattcaatgaggagacttgcctggtgaaaatcatcactggtcttt

SEQ ID NO: 2404 - DNA, 45 bp, Mus sp.
aaatgagaaaagagttgtgcaatggcaattctgattgtatgaaca

SEQ ID NO: 2405 - DNA, 45 bp, Homo sapiens
tggcagaaaacaacctgaaccttccaaagatggctgaaaaagatg

SEQ ID NO: 2406 - DNA, 45 bp, Homo sapiens
aagcagcaaagaggcactggcagaaaacaacctgaaccttccaaa

SEQ ID NO: 2407 - DNA, 45 bp, Homo sapiens
aagagtaacatgtgtgaaagcagcaaagaggcactggcagaaaac

SEQ ID NO: 2408 - DNA, 45 bp, Homo sapiens
atcctcgacggcatctcagccctgagaaaggagacatgtaacaag

SEQ ID NO: 2409 - DNA, 45 bp, Mus sp.
tttacctcaatgaattgctaatttaaatatgtttttaaagaaatc

SEQ ID NO: 2410 - DNA, 45 bp, Mus sp.
ctagccagatggtttcttggaatgtataagtttacctcaatgaat

SEQ ID NO: 2411 - RNA, 20 nt, Homo sapiens
caacccaaguucaaaggcug

SEQ ID NO: 2412 - RNA, 20 nt, Homo sapiens
ucuaucaaaguucacuugcu

SEQ ID NO: 2413 - RNA, 20 nt, Homo sapiens
acuugcuucuuggaauuaua

SEQ ID NO: 2414 - RNA, 20 nt, Homo sapiens
uuggaauuauaacaccaaua

SEQ ID NO: 2415 - RNA, 20 nt, Homo sapiens
aauccacaagaaugcuuauu

SEQ ID NO: 2416 - RNA, 20 nt, Homo sapiens
gauggcaagagcaaaucauu

SEQ ID NO: 2417 - RNA, 20 nt, Homo sapiens
gaagagauuaaaccauuaua

SEQ ID NO: 2418 - RNA, 20 nt, Homo sapiens
agauuuuggacaaaucugua

SEQ ID NO: 2419 - RNA, 20 nt, Homo sapiens
uuggacagaaaccaaacaua

SEQ ID NO: 2420 - RNA, 20 nt, Homo sapiens
ccuaauaugacucaaggauu

SEQ ID NO: 2421 - RNA, 20 nt, Homo sapiens
ucugcuaagaaauggagcua

SEQ ID NO: 2422 - RNA, 20 nt, Homo sapiens
ggggaaaucaugucacuuuc

SEQ ID NO: 2423 - RNA, 20 nt, Homo sapiens
ugaaacagaaauaaacuucc

SEQ ID NO: 2424 - RNA, 20 nt, Homo sapiens
ucacgauuguugggacucug

SEQ ID NO: 2425 - RNA, 20 nt, Homo sapiens
guggagguggauggucuuua

SEQ ID NO: 2426 - RNA, 20 nt, Homo sapiens
cuaaugauuacucauucauu

SEQ ID NO: 2427 - RNA, 20 nt, Homo sapiens
uucgauauuacacaaggacc

SEQ ID NO: 2428 - RNA, 20 nt, Homo sapiens
cuuuaccaauuccaguuuca

SEQ ID NO: 2429 - RNA, 20 nt, Homo sapiens
cugcacaaaugugacaucuc

SEQ ID NO: 2430 - RNA, 20 nt, Homo sapiens
uagaaaauauaagaugauaa

SEQ ID NO: 2431 - RNA, 20 nt, Homo sapiens
auggccaaggagagagcauc

SEQ ID NO: 2432 - RNA, 20 nt, Homo sapiens
auugacauugcuuucaguau

SEQ ID NO: 2433 - RNA, 20 nt, Homo sapiens
uucaguauuuauuucugucu

SEQ ID NO: 2434 - RNA, 20 nt, Homo sapiens
uuuggaaucgaucaugcuuu

SEQ ID NO: 2435 - DNA, 45 bp, Homo sapiens
gttttgaatagcgcccaacccaagttcaaaggctgataagagaga

SEQ ID NO: 2436 - DNA, 45 bp, Homo sapiens
aagccgaagacctgttctatcaaagttcacttgcttcttggaatt

SEQ ID NO: 2437 - DNA, 45 bp, Homo sapiens
gttctatcaaagttcacttgcttcttggaattataacaccaatat

SEQ ID NO: 2438 - DNA, 45 bp, Homo sapiens
aagttcacttgcttcttggaattataacaccaatattactgaaga

SEQ ID NO: 2439 - DNA, 45 bp, Homo sapiens
gtttgtaacccagataatccacaagaatgcttattacttgaacca

SEQ ID NO: 2440 - DNA, 45 bp, Homo sapiens
ggtcttgaaaaatgagatggcaagagcaaatcattatgaggacta

SEQ ID NO: 2441 - DNA, 45 bp, Homo sapiens
gtggaacatacctttgaagagattaaaccattatatgaacatctt

SEQ ID NO: 2442 - DNA, 45 bp, Homo sapiens
ggtgatatgtggggtagattttggacaaatctgtactctttgaca

SEQ ID NO: 2443 - DNA, 45 bp, Homo sapiens
ctttgacagttccctttggacagaaaccaaacatagatgttactg

SEQ ID NO: 2444 - DNA, 45 bp, Homo sapiens
gtatctgttggtcttcctaatatgactcaaggattctgggaaaat

SEQ ID NO: 2445 - DNA, 45 bp, Homo sapiens
tgctgcacaaccttttctgctaagaaatggagctaatgaaggatt

SEQ ID NO: 2446 - DNA, 45 bp, Homo sapiens
ttccatgaagctgttggggaaatcatgtcactttctgcagccaca

SEQ ID NO: 2447 - DNA, 45 bp, Homo sapiens
ttttcaagaagacaatgaaacagaaataaacttcctgctcaaaca

SEQ ID NO: 2448 - DNA, 45 bp, Homo sapiens
tgctcaaacaagcactcacgattgttgggactctgccatttactt

SEQ ID NO: 2449 - DNA, 45 bp, Homo sapiens
ttacatgttagagaagtggaggtggatggtctttaaaggggaaat

SEQ ID NO: 2450 - DNA, 45 bp, Homo sapiens
ctctgttccatgtttctaatgattactcattcattcgatattaca

SEQ ID NO: 2451 - DNA, 45 bp, Homo sapiens
atgattactcattcattcgatattacacaaggaccctttaccaat

SEQ ID NO: 2452 - DNA, 45 bp, Homo sapiens
tattacacaaggaccctttaccaattccagtttcaagaagcactt

SEQ ID NO: 2453 - DNA, 45 bp, Homo sapiens
aaacatgaaggccctctgcacaaatgtgacatctcaaactctaca

SEQ ID NO: 2454 - DNA, 45 bp, Homo sapiens
gttaatttcatggtatagaaaatataagatgataaagatatcatt

SEQ ID NO: 2455 - DNA, 45 bp, Homo sapiens
ttgtccaaagacaacatggccaaggagagagcatcttcattgaca

SEQ ID NO: 2456 - DNA, 45 bp, Homo sapiens
ggagagagcatcttcattgacattgctttcagtatttatttctgt

SEQ ID NO: 2457 - DNA, 45 bp, Homo sapiens
ttcattgacattgctttcagtatttatttctgtctctggatttga

SEQ ID NO: 2458 - DNA, 45 bp, Homo sapiens
ttgcctacagtgatgtttggaatcgatcatgctttcttcaaggtg

SEQ ID NO: 2459 - RNA, 20 nt, Homo sapiens
ucaaccugggccagaucuuc

SEQ ID NO: 2460 - RNA, 20 nt, Homo sapiens
auuaccacuucuggcaucga

SEQ ID NO: 2461 - RNA, 20 nt, Homo sapiens
gcaggcaauuaugauccugg

SEQ ID NO: 2462 - RNA, 20 nt, Homo sapiens
uuugaugucaaugaccagga

SEQ ID NO: 2463 - RNA, 20 nt, Homo sapiens
gaggccaauaagaaccucac

SEQ ID NO: 2464 - RNA, 20 nt, Homo sapiens
uucaugacaacucauuccug

SEQ ID NO: 2465 - RNA, 20 nt, Homo sapiens
ugggacgcugaccaaguuca

SEQ ID NO: 2466 - RNA, 20 nt, Homo sapiens
ugaccaaguucacccucgua

SEQ ID NO: 2467 - RNA, 20 nt, Homo sapiens
uuuuaauucaccaaaguauu

SEQ ID NO: 2468 - RNA, 20 nt, Homo sapiens
uuuaauucaccaaaguauuu

SEQ ID NO: 2469 - RNA, 20 nt, Homo sapiens
uguuugaggauauauuuuca

SEQ ID NO: 2470 - RNA, 20 nt, Homo sapiens
uuugaggauauauuuucacu

SEQ ID NO: 2471 - RNA, 20 nt, Homo sapiens
ugaggauauauuuucacuuu

SEQ ID NO: 2472 - RNA, 20 nt, Homo sapiens
uuucacuuugugauuauuuc

SEQ ID NO: 2473 - RNA, 20 nt, Homo sapiens
uauuucacuuuagaugcuga

SEQ ID NO: 2474 - RNA, 20 nt, Homo sapiens
uuagaugcugaugauuuguu

SEQ ID NO: 2475 - RNA, 20 nt, Homo sapiens
cugguuuuguaagaugcugg

SEQ ID NO: 2476 - RNA, 20 nt, Homo sapiens
uggguuggugcacagugauu

SEQ ID NO: 2477 - RNA, 20 nt, Homo sapiens
cuuguaauuuaaacaggccc

SEQ ID NO: 2478 - RNA, 20 nt, Homo sapiens
uuaaacaggcccagcauugc

SEQ ID NO: 2479 - RNA, 20 nt, Homo sapiens
cccagcauugcugguucuau

SEQ ID NO: 2480 - RNA, 20 nt, Homo sapiens
ugagauaauguuagagguuu

SEQ ID NO: 2481 - RNA, 20 nt, Homo sapiens
gagauaauguuagagguuuu

SEQ ID NO: 2482 - RNA, 20 nt, Homo sapiens
uuagagguuuuaaagugauu

SEQ ID NO: 2483 - DNA, 45 bp, Homo sapiens
ggaagcatgggttcctcaacctgggccagatcttcggggactatt

SEQ ID NO: 2484 - DNA, 45 bp, Homo sapiens
agatcttcggggactattaccacttctggcatcgaggagtgacga

SEQ ID NO: 2485 - DNA, 45 bp, Homo sapiens
aaccacccggacttggcaggcaattatgatcctggggccagtttt

SEQ ID NO: 2486 - DNA, 45 bp, Homo sapiens
gatcctggggccagttttgatgtcaatgaccaggaccctgacccc

SEQ ID NO: 2487 - DNA, 45 bp, Homo sapiens
attgctctcaccctggaggccaataagaacctcacatggcgggac

SEQ ID NO: 2488 - DNA, 45 bp, Homo sapiens
tttaatgactgggccttcatgacaactcattcctgggatgaggat

SEQ ID NO: 2489 - DNA, 45 bp, Homo sapiens
cgaagccaacaactatgggacgctgaccaagttcaccctcgtact

SEQ ID NO: 2490 - DNA, 45 bp, Homo sapiens
acaactatgggacgctgaccaagttcaccctcgtactctatggca

SEQ ID NO: 2491 - DNA, 45 bp, Homo sapiens
ccctccttgggcactttttaattcaccaaagtatttttttatctt

SEQ ID NO: 2492 - DNA, 45 bp, Homo sapiens
cctccttgggcactttttaattcaccaaagtatttttttatcttg

SEQ ID NO: 2493 - DNA, 45 bp, Homo sapiens
ggggatctcaggggctgtttgaggatatattttcactttgtgatt

SEQ ID NO: 2494 - DNA, 45 bp, Homo sapiens
ggatctcaggggctgtttgaggatatattttcactttgtgattat

SEQ ID NO: 2495 - DNA, 45 bp, Homo sapiens
atctcaggggctgtttgaggatatattttcactttgtgattattt

SEQ ID NO: 2496 - DNA, 45 bp, Homo sapiens
tgtttgaggatatattttcactttgtgattatttcactttagatg

SEQ ID NO: 2497 - DNA, 45 bp, Homo sapiens
ttttcactttgtgattatttcactttagatgctgatgatttgttt

SEQ ID NO: 2498 - DNA, 45 bp, Homo sapiens
tgtgattatttcactttagatgctgatgatttgtttttgtatttt

SEQ ID NO: 2499 - DNA, 45 bp, Homo sapiens
tcgtggccagcccggctggttttgtaagatgctgggttggtgcac

SEQ ID NO: 2500 - DNA, 45 bp, Homo sapiens
ggttttgtaagatgctgggttggtgcacagtgatttttttcttgt

SEQ ID NO: 2501 - DNA, 45 bp, Homo sapiens
cacagtgatttttttcttgtaatttaaacaggcccagcattgctg

SEQ ID NO: 2502 - DNA, 45 bp, Homo sapiens
tttttttcttgtaatttaaacaggcccagcattgctggttctatt

SEQ ID NO: 2503 - DNA, 45 bp, Homo sapiens
tgtaatttaaacaggcccagcattgctggttctatttaatggaca

SEQ ID NO: 2504 - DNA, 45 bp, Homo sapiens
tctatttaatggacatgagataatgttagaggttttaaagtgatt

SEQ ID NO: 2505 - DNA, 45 bp, Homo sapiens
ctatttaatggacatgagataatgttagaggttttaaagtgatta

SEQ ID NO: 2506 - DNA, 45 bp, Homo sapiens
ggacatgagataatgttagaggttttaaagtgattaaacgtgcag

SEQ ID NO: 2507 - RNA, 20 nt, Homo sapiens
ugagucaugugcgaguggga

SEQ ID NO: 2508 - RNA, 20 nt, Homo sapiens
agagccggaagacaaugcca

SEQ ID NO: 2509 - RNA, 20 nt, Homo sapiens
cucagcaauguuguuuguga

SEQ ID NO: 2510 - RNA, 20 nt, Homo sapiens
gcucuuggugaggaaguuuc

SEQ ID NO: 2511 - RNA, 20 nt, Homo sapiens
agugucgggagcaaguucag

SEQ ID NO: 2512 - RNA, 20 nt, Homo sapiens
uucagcaaaacucaaaccuu

SEQ ID NO: 2513 - RNA, 20 nt, Homo sapiens
ucaaaccuuucaggguugug

SEQ ID NO: 2514 - RNA, 20 nt, Homo sapiens
uucaggguuguggaaucuug

SEQ ID NO: 2515 - RNA, 20 nt, Homo sapiens
cacuccuggaacucaucuuu

SEQ ID NO: 2516 - RNA, 20 nt, Homo sapiens
acuccuggaacucaucuuuc

SEQ ID NO: 2517 - RNA, 20 nt, Homo sapiens
gguuugagcucagauaucgg

SEQ ID NO: 2518 - RNA, 20 nt, Homo sapiens
ucagauaucgggcugaacgg

SEQ ID NO: 2519 - RNA, 20 nt, Homo sapiens
cugaacggucaaagacauuc

SEQ ID NO: 2520 - RNA, 20 nt, Homo sapiens
aaagacauucacaacaugga

SEQ ID NO: 2521 - RNA, 20 nt, Homo sapiens
uccagcaucacugugucauc

SEQ ID NO: 2522 - RNA, 20 nt, Homo sapiens
uuggacagaaggucuccuga

SEQ ID NO: 2523 - RNA, 20 nt, Homo sapiens
ccugagagggucacugcaaa

SEQ ID NO: 2524 - RNA, 20 nt, Homo sapiens
cacugcaaaagagaaucucg

SEQ ID NO: 2525 - RNA, 20 nt, Homo sapiens
ugcaaaagagaaucucguuc

SEQ ID NO: 2526 - RNA, 20 nt, Homo sapiens
guggaccacgccuaaacuaa

SEQ ID NO: 2527 - RNA, 20 nt, Homo sapiens
uggaccacgccuaaacuaau

SEQ ID NO: 2528 - RNA, 20 nt, Homo sapiens
ugugccagcuggagugauga

SEQ ID NO: 2529 - DNA, 45 bp, Homo sapiens
gaccgtccgccgctctgagtcatgtgcgagtgggaagtcgcactg

SEQ ID NO: 2530 - DNA, 45 bp, Homo sapiens
gacctgcccgggggtagagccggaagacaatgccactgttcactg

SEQ ID NO: 2531 - DNA, 45 bp, Homo sapiens
ttccggaagagccccctcagcaatgttgtttgtgagtggggtcct

SEQ ID NO: 2532 - DNA, 45 bp, Homo sapiens
gacgacaaaggctgtgctcttggtgaggaagtttcagaacagtcc

SEQ ID NO: 2533 - DNA, 45 bp, Homo sapiens
atgtgcgtcgccagtagtgtcgggagcaagttcagcaaaactcaa

SEQ ID NO: 2534 - DNA, 45 bp, Homo sapiens
agtgtcgggagcaagttcagcaaaactcaaacctttcagggttgt

SEQ ID NO: 2535 - DNA, 45 bp, Homo sapiens
caagttcagcaaaactcaaacctttcagggttgtggaatcttgca

SEQ ID NO: 2536 - DNA, 45 bp, Homo sapiens
gcaaaactcaaacctttcagggttgtggaatcttgcagcctgatc

SEQ ID NO: 2537 - DNA, 45 bp, Homo sapiens
acctggcaagacccccactcctggaactcatctttctacagacta

SEQ ID NO: 2538 - DNA, 45 bp, Homo sapiens
cctggcaagacccccactcctggaactcatctttctacagactac

SEQ ID NO: 2539 - DNA, 45 bp, Homo sapiens
ctttctacagactacggtttgagctcagatatcgggctgaacggt

SEQ ID NO: 2540 - DNA, 45 bp, Homo sapiens
gactacggtttgagctcagatatcgggctgaacggtcaaagacat

SEQ ID NO: 2541 - DNA, 45 bp, Homo sapiens
agctcagatatcgggctgaacggtcaaagacattcacaacatgga

SEQ ID NO: 2542 - DNA, 45 bp, Homo sapiens
tcgggctgaacggtcaaagacattcacaacatggatggtcaagga

SEQ ID NO: 2543 - DNA, 45 bp, Homo sapiens
ggatggtcaaggacctccagcatcactgtgtcatccacgacgcct

SEQ ID NO: 2544 - DNA, 45 bp, Homo sapiens
ggccatgggcacgccttggacagaaggtctcctgagagggtcact

SEQ ID NO: 2545 - DNA, 45 bp, Homo sapiens
ttggacagaaggtctcctgagagggtcactgcaaaagagaatctc

SEQ ID NO: 2546 - DNA, 45 bp, Homo sapiens
gtctcctgagagggtcactgcaaaagagaatctcgttccaacctc

SEQ ID NO: 2547 - DNA, 45 bp, Homo sapiens
tcctgagagggtcactgcaaaagagaatctcgttccaacctccct

SEQ ID NO: 2548 - DNA, 45 bp, Homo sapiens
cctgtcaatctgaacgtggaccacgcctaaactaatttttgactg

SEQ ID NO: 2549 - DNA, 45 bp, Homo sapiens
ctgtcaatctgaacgtggaccacgcctaaactaatttttgactgc

SEQ ID NO: 2550 - DNA, 45 bp, Homo sapiens
ctaatttttgactgctgtgccagctggagtgatgataggctcact

SEQ ID NO: 2551 - DNA, 16 bp, Artificial Sequence
  Description of Artificial Sequence: Synthetic oligonucleotide
gcaagtgaactttgat

SEQ ID NO: 2552 - DNA, 16 bp, Artificial Sequence
  Description of Artificial Sequence: Synthetic oligonucleotide
aaaggcagaccatttg

SEQ ID NO: 2553 - DNA, 16 bp, Artificial Sequence
  Description of Artificial Sequence: Synthetic oligonucleotide
ggcctcagctgcttgc

SEQ ID NO: 2554 - DNA, 16 bp, Artificial Sequence
  Description of Artificial Sequence: Synthetic oligonucleotide
gccgcggctgtagtca

SEQ ID NO: 2555 - DNA, 16 bp, Artificial Sequence
  Description of Artificial Sequence: Synthetic oligonucleotide
atcaactggccgcggc

SEQ ID NO: 2556 - DNA, 16 bp, Artificial Sequence
  Description of Artificial Sequence: Synthetic oligonucleotide
taccccacatatcacc

SEQ ID NO: 2557 - DNA, 16 bp, Artificial Sequence
  Description of Artificial Sequence: Synthetic oligonucleotide
aggcctggtccaccat

SEQ ID NO: 2558 - DNA, 16 bp, Artificial Sequence
  Description of Artificial Sequence: Synthetic oligonucleotide
tcttcttgaaaatcgg

SEQ ID NO: 2559 - DNA, 16 bp, Artificial Sequence
  Description of Artificial Sequence: Synthetic oligonucleotide
aagaccatccacctcc

SEQ ID NO: 2560 - DNA, 16 bp, Artificial Sequence
  Description of Artificial Sequence: Synthetic oligonucleotide
gggtcacagtatgttt

SEQ ID NO: 2561 - DNA, 16 bp, Artificial Sequence
  Description of Artificial Sequence: Synthetic oligonucleotide
gatgtcacatttgtgc

SEQ ID NO: 2562 - DNA, 16 bp, Artificial Sequence
  Description of Artificial Sequence: Synthetic oligonucleotide
gagttcacggaggccc

SEQ ID NO: 2563 - DNA, 16 bp, Artificial Sequence
  Description of Artificial Sequence: Synthetic oligonucleotide
ccggggctgactggtg

SEQ ID NO: 2564 - DNA, 16 bp, Artificial Sequence
  Description of Artificial Sequence: Synthetic oligonucleotide
aagatctggcccaggt

SEQ ID NO: 2565 - DNA, 16 bp, Artificial Sequence
  Description of Artificial Sequence: Synthetic oligonucleotide
gtcacctcgccatcca

SEQ ID NO: 2566 - DNA, 16 bp, Artificial Sequence
  Description of Artificial Sequence: Synthetic oligonucleotide
tcatcctcggggcccc

SEQ ID NO: 2567 - DNA, 16 bp, Artificial Sequence
  Description of Artificial Sequence: Synthetic oligonucleotide
cgcagttgcagctgtc

SEQ ID NO: 2568 - DNA, 16 bp, Artificial Sequence
  Description of Artificial Sequence: Synthetic oligonucleotide
tggcgctgctgatgga

SEQ ID NO: 2569 - DNA, 16 bp, Artificial Sequence
  Description of Artificial Sequence: Synthetic oligonucleotide
tgatgccggctgctaa

SEQ ID NO: 2570 - DNA, 16 bp, Artificial Sequence
  Description of Artificial Sequence: Synthetic oligonucleotide
gctggggggccactgt

SEQ ID NO: 2571 - DNA, 16 bp, Artificial Sequence
  Description of Artificial Sequence: Synthetic oligonucleotide
cacatgaggcgtggca

SEQ ID NO: 2572 - DNA, 16 bp, Artificial Sequence
  Description of Artificial Sequence: Synthetic oligonucleotide
gtggcacatgaggcgt

SEQ ID NO: 2573 - DNA, 16 bp, Artificial Sequence
  Description of Artificial Sequence: Synthetic oligonucleotide
agggcgctctggtctt

SEQ ID NO: 2574 - DNA, 16 bp, Artificial Sequence
  Description of Artificial Sequence: Synthetic oligonucleotide
tcagagggcgctctgg

SEQ ID NO: 2575 - RNA, 21 nt, Artificial Sequence
  Description of Artificial Sequence: Synthetic oligonucleotide
ugaaaguucaaucauucuuuu

SEQ ID NO: 2576 - RNA, 16 nt, Artificial Sequence
  Description of Artificial Sequence: Synthetic oligonucleotide
aaugauugaacuuuca

SEQ ID NO: 2577 - RNA, 21 nt, Artificial Sequence
  Description of Artificial Sequence: Synthetic oligonucleotide
ugaaauuuggaucuuuguuuu

SEQ ID NO: 2578 - RNA, 16 nt, Artificial Sequence
  Description of Artificial Sequence: Synthetic oligonucleotide
aaagauccaaauuuca

SEQ ID NO: 2579 - RNA, 21 nt, Artificial Sequence
  Description of Artificial Sequence: Synthetic oligonucleotide
uaagcuuaaagaaugucuuuu

SEQ ID NO: 2580 - RNA, 16 nt, Artificial Sequence
  Description of Artificial Sequence: Synthetic oligonucleotide
acauucuuuaagcuua

SEQ ID NO: 2581 - RNA, 21 nt, Artificial Sequence
  Description of Artificial Sequence: Synthetic oligonucleotide
ucaaauacgacucugucuuuu

SEQ ID NO: 2582 - RNA, 16 nt, Artificial Sequence
  Description of Artificial Sequence: Synthetic oligonucleotide
acagagucguauuuga

SEQ ID NO: 2583 - DNA, 20 bp, Severe acute respiratory syndrome coronavirus 2
tttgctaacaaacatgctga

SEQ ID NO: 2584 - DNA, 20 bp, Severe acute respiratory syndrome-related coronavirus
tttgcaaataaacatgctgg

SEQ ID NO: 2585 - DNA, 19 bp, Middle East respiratory syndrome-related coronavirus
tttgctaataagcaccggt

SEQ ID NO: 2586 - DNA, 20 bp, Human coronavirus NL63
gttcgtaatgtttttgataa

SEQ ID NO: 2587 - DNA, 20 bp, Human coronavirus 229E
gtcagaaacgtttttgaaaa

SEQ ID NO: 2588 - DNA, 20 bp, Human coronavirus HKU1
tttgctaataaatttttcca

SEQ ID NO: 2589 - DNA, 20 bp, Unknown
  Description of Unknown: Human coronavirus OC43 sequence
ttcgctaacaaatttgaaca

SEQ ID NO: 2590 - DNA, 20 bp, Severe acute respiratory syndrome coronavirus 2
ggtaactggtatgatttcgg

SEQ ID NO: 2591 - DNA, 20 bp, Severe acute respiratory syndrome-related coronavirus
gggaactggtacgatttcgg

SEQ ID NO: 2592 - DNA, 20 bp, Middle East respiratory syndrome-related coronavirus
ggcaagtggtatgattttgg

SEQ ID NO: 2593 - DNA, 20 bp, Human coronavirus NL63
ggtaacttttatgattttgg

SEQ ID NO: 2594 - DNA, 20 bp, Human coronavirus 229E
gggaatttctatgacttcgg

SEQ ID NO: 2595 - DNA, 20 bp, Human coronavirus HKU1
ggtcaatggtatgattttgg

SEQ ID NO: 2596 - DNA, 20 bp, Unknown
  Description of Unknown: Human coronavirus OC43 sequence
ggtaaatggtatgattttgg
